(19) United States
(12) Patent Application Publication
(10) Pub. No.: US 2020/0056191 A1
(43) Pub. Date: Feb. 20, 2020

(54) APPLICATIONS OF CRISPRi IN HIGH THROUGHPUT METABOLIC ENGINEERING

(71) Applicant: Zymergen Inc., Emeryville, CA (US)

(72) Inventors: Brian Chaikind, Orinda, CA (US); Hendrik M. Van Rossum, Delft (NL); Aaron Miller, El Cerrito, CA (US); Paul Perkovich, Berkeley, CA (US); Shawn Szyjka, Martinez, CA (US); Kedar Patel, Fremont, CA (US)

(21) Appl. No.: 16/541,354

(22) Filed: Aug. 15, 2019

Related U.S. Application Data
(60) Provisional application No. 62/764,672, filed on Aug. 15, 2018.

(51) Int. Cl. C12N 15/64; C12N 15/10

(52) U.S. Cl. CPC C12N 15/64; C12N 9/22; C12N 2310/20; C12N 15/102

(57) ABSTRACT

The disclosure describes methods, compositions, and kits for high throughput DNA assembly reactions in vitro. The disclosure further describes modular CRISPR DNA constructs comprising modular insert DNA parts flanked by cloning tag segments comprising pre-validated CRISPR protospacer/protospacer adjacent motif sequence combinations. High throughput methods of CRISPRi and CRISPRa are also disclosed.

### CROSS-REFERENCE TO RELATED APPLICATIONS

[0001] This application claims the benefit of priority to U.S. Provisional Application No. 62/764,672, filed on Aug. 15, 2018, which is hereby incorporated by reference in its entirety, including all descriptions, references, figures, and claims for all purposes.

### GOVERNMENT FUNDING

[0002] This invention was made with government support under Agreement No. HR0011-15-9-0014, awarded by DARPA. The government has certain rights in the invention.

### STATEMENT REGARDING SEQUENCE LISTING

[0003] The sequence listing associated with this application is provided in text format in lieu of a paper copy, and is hereby incorporated by reference into the specification. The name of the text file containing the sequence listing is ZYMR_030_02US_SeqList_ST25.txt. The text file is 801 kb, was created on Aug. 14, 2019, and is being submitted electronically via EFS-Web.

### FIELD

[0004] The present disclosure relates to systems, methods, and compositions used for guided genetic sequence editing in vitro. The disclosure describes, inter alia, methods of using guided sequence editing complexes for improved DNA cloning, assembly of oligonucleotides, and for the improvement of microorganisms. The disclosure also describes high throughput methods of modulating the expression of host cell genes via mutant CRISPR enzymes.

### BACKGROUND

[0005] A major area of interest in biology is the in vitro and in vivo targeted modification of genetic sequences. Indeed, one of the most significant bottlenecks to academic and commercial genetic research has been the speed with which novel genetic constructs could be generated or later modified prior to testing.

[0006] The currently available cloning techniques relying on restriction site recognition or DNA hybridization and amplification have proven to be slow, unreliable, and intractable to later modifications. The discovery of Clustered Regularly Interspaced Short Palindromic Repeats (CRISPR) gene editing systems have provided researchers with additional avenues for genetic modification. Even these new approaches, however, remain impractical for high throughput modular cloning applications.

[0007] For example, the use of catalytically active or inactivated CRISPR enzymes permit researchers to effectuate targeted gene expression repressions (CRISPRi) or activations (CRISPRa). These techniques however, are still subject to the technical limitations of CRISPR applications, and thus not optimized for high throughput applications.

[0008] CRISPR editing locations for example, are often limited by the location of protospacer adjacent motifs (PAMs). De novo CRISPR guide RNA design and gene targeting can be both time consuming and expensive, and is also susceptible to low efficiencies, and potential for off-target mutations.

[0009] Thus, there is a need for improved compositions and methods for targeted alteration of genetic sequences and modulation of gene expression.

### SUMMARY OF THE DISCLOSURE

[0010] In some embodiments, the present disclosure teaches methods, compositions, and kits for high-throughput DNA assembly reactions in vivo and in vitro utilizing modular CRISPR DNA constructs.

[0011] Thus, in some embodiments, the present disclosure teaches CRISPR DNA constructs comprising modular insert DNA parts flanked by cloning tag segments comprising pre-validated CRISPR protospacer/protospacer adjacent motif (PAM) sequence combinations. In some embodiments, the present disclosure teaches digesting DNA with CRISPR endonucleases. In some embodiments, the present disclosure teaches digesting DNA with Type II—Class 2 CRISPR endonucleases (e.g. Cas9). In some embodiments, the present disclosure teaches digesting DNA with Type V—Class 2 CRISPR endonucleases. In some embodiments, the present disclosure teaches digesting DNA with Cpf1 endonucleases.

[0012] In some embodiments, the present disclosure teaches a recombinant modular CRISPR DNA construct comprising a CRISPR multi-clonal site, said multi-clonal site comprising: a) at least two distinct cloning tags (cTAG), wherein each cTAG comprises: i) one or more validated CRISPR landing sites, each comprising a protospacer sequence operably linked to a protospacer adjacent motif (PAM); wherein at least one of said validated CRISPR landing sites is unique within the modular CRISPR DNA construct; and b) one or more DNA insert sequences; i) wherein each of said cTAGs are distributed in flanking positions around each of the one or more DNA insert sequences; and ii) wherein at least one of said DNA insert sequences comprises a selection marker.

[0013] In some embodiments, the present disclosure teaches a recombinant modular CRISPR DNA construct, wherein said modular CRISPR DNA construct is circular.

[0014] In some embodiments, the present disclosure teaches a recombinant modular CRISPR DNA construct, wherein said modular CRISPR DNA construct is linear.

[0015] In some embodiments, the present disclosure teaches a recombinant modular CRISPR DNA construct, wherein said modular CRISPR DNA construct is integrated into the genome of an organism.

[0016] In some embodiments, the present disclosure teaches a recombinant modular CRISPR DNA construct, wherein at least one of said distinct cTAGs comprises at least two validated CRISPR landing sites.

[0017] In some embodiments, the present disclosure teaches a recombinant modular CRISPR DNA construct, wherein at least one of the CRISPR landing sites is for a Cas9 endonuclease.

[0018] In some embodiments, the present disclosure teaches a recombinant modular CRISPR DNA construct, wherein at least one of the CRISPR landing sites is for a RNA or DNA guided nuclease, for example, the Cpf1 endonuclease.

[0019] In some embodiments, the present disclosure teaches a recombinant modular CRISPR DNA construct, wherein at least one of said distinct cTAGs comprises a rare (≥8 bases long) restriction endonuclease site.

[0020] In some aspects, the disclosure refers to a recombinant modular CRISPR DNA construct as a “MegaModular” construct.

[0021] In some embodiments, the present disclosure teaches a method for preparing a recombinant nucleic acid molecule, the method comprising: a) forming a mixture comprising: i) a plurality of DNA insert parts, wherein each DNA insert part is flanked by two cloning tags (cTAGs), each cTAG comprising: 1) one or more validated CRISPR landing sites, each comprising a protospacer sequence operably linked to a protospacer adjacent motif (PAM); ii) one or more CRISPR complexes targeting at least one of said cTAGs present in at least two of the plurality of DNA insert parts, each CRISPR complex comprising; 1) a CRISPR endonuclease, and 2) a guide RNA or guide RNAs capable of recruiting said CRISPR endonuclease to one of said targeted cTAGs; wherein the mixture is incubated under conditions which allow for digestion of the targeted cTAG(s) in at least two of the plurality of DNA insert parts to generate overhanging ends, and b) incubating the digestion products generated in (a) in conditions which allow for hybridization of compatible overhanging ends and covalent joining of the hybridized ends; wherein the resulting recombinant nucleic acid molecule comprises the complete cTAG sequences of the original insert parts that are ligated in the method.

[0022] In some embodiments, the present disclosure teaches a method for preparing a recombinant nucleic acid molecule, wherein the CRISPR endonuclease is Cpf1.

[0023] In some embodiments, the present disclosure teaches a method for preparing a recombinant nucleic acid molecule, wherein the CRISPR endonuclease is a DNA or RNA guided endonuclease, for example, Cas9.

[0024] In some embodiments, the present disclosure teaches a method for preparing a recombinant nucleic acid molecule, wherein the method comprises the step of: i) separating the digested cTAG sequences from the CRISPR complexes prior to ligation, or ii) inactivating the CRISPR complexes prior to ligation.

[0025] In some embodiments, the present disclosure teaches a method for preparing a recombinant nucleic acid molecule, wherein the separation step comprises a DNA purification step.

[0026] In some embodiments, the present disclosure teaches a method for preparing a recombinant nucleic acid molecule, wherein the inactivation step comprises heat or chemical inactivation of said CRISPR complexes.

[0027] In some embodiments, the present disclosure teaches a method for preparing a recombinant nucleic acid molecule, wherein the two cTAGs for each of the plurality of DNA insert parts form a cTAG pair, and wherein said cTAG pair is unique from all other cTAG pairs of the DNA insert parts that are ligated in the method.

[0028] In some embodiments, the present disclosure teaches a method for preparing a recombinant nucleic acid molecule, wherein at least one of the cTAGs in each cTAG pair is the same as at least one other cTAG in a different cTAG pair.

[0029] In some embodiments, the present disclosure teaches a method for DNA sequence editing, said method comprising: a) introducing into a reaction: i) the modular CRISPR DNA construct of the present disclosure: ii) a replacement DNA insert part, wherein said replacement DNA insert part is flanked by a first and second insert cTAG; 1) wherein the first insert cTAG comprises the validated CRISPR landing site(s) of one of the distinct cTAGs of the modular CRISPR DNA construct, and the second insert cTAG comprises the validated CRISPR landing site(s) of another distinct cTAG of the modular CRISPR DNA construct; and iii) a first and second CRISPR complex targeting the first and second insert cTAGs, respectively, each CRISPR complex comprising: 1) a CRISPR endonuclease, and 2) a guide RNA capable of recruiting said CRISPR endonuclease to one of said targeted insert cTAGs; wherein the first and second CRISPR complexes cleave the first and second insert cTAGs and their corresponding distinct cTAGs to generate overhanging ends, and b) incubating the replacement DNA insert part and modular CRISPR DNA construct with digested cTAGs generated: (a) under conditions which allow for hybridization of compatible overhanging ends and covalent joining of the hybridized ends; wherein the resulting edited modular CRISPR DNA construct comprises the complete cTAG sequences of the original insert part that is ligated by the method.

[0030] In some embodiments, the present disclosure teaches a method for DNA sequence editing, wherein the reaction of step (b) comprises a functional ligase.

[0031] In some embodiments, the present disclosure teaches a method for DNA sequence editing, said method comprising: a) introducing into a reaction: i) the modular CRISPR DNA construct of the present disclosure; ii) at least two CRISPR complexes targeting two distinct cTAGs in the modular CRISPR DNA construct, each CRISPR complex comprising; 1) a CRISPR endonuclease, and 2) a guide RNA capable of recruiting said CRISPR endonuclease to one of said targeted distinct cTAGs; wherein the first and second CRISPR complexes cleave the two distinct cTAGs in the modular CRISPR DNA construct, wherein the resulting distinct cTAGs comprise overhang ends, and b) introducing into a second reaction: i) the modular CRISPR DNA construct with digested cTAGs generated in (a); and ii) a replacement DNA insert part, wherein said replacement DNA insert part is flanked by a first and second insert cTAG; 1) wherein the first insert cTAG comprises the polynucleotide sequence of one of the undigested distinct cTAGs that is cleaved in (a), and the second insert cTAG comprises the polynucleotide sequence of another undigested distinct cTAG that is cleaved in (a); and 2) wherein the first and second insert cTAGs comprise overhang ends that are compatible with the overhang ends of the distinct cTAGs from (a); under conditions which allow for hybridization of compatible the overhanging ends and covalent joining of the hybridized ends; wherein the resulting edited modular CRISPR DNA construct comprises the complete sequences of the original undigested distinct cTAGs that were targeted in (a).

[0032] In some embodiments, the present disclosure teaches a method for DNA sequence editing, wherein the reaction of step (b) comprises a functional ligase.

[0033] In some embodiments, the present disclosure teaches a method for DNA sequence editing, wherein the CRISPR endonuclease is Cpf1.

[0034] In some embodiments, the present disclosure teaches a method for DNA sequence editing, wherein step (a) further comprises digesting the two cleaved distinct cTAGs with a single stranded exonuclease, thereby producing the distinct cTAGs with overhang ends. In some aspects, one may add a ligase and polymerase to repair the junctions with a polymerase and ligase after the exonuclease step. In some aspects, this reaction can also be done with Cas9 digested, blunt-end cuts.

[0035] In some embodiments, the present disclosure teaches a method for DNA sequence editing, wherein the CRISPR endonuclease is Cas9.

[0036] In some embodiments, the disclosure provides for a host cell genome comprising a recombinant modular CRISPR DNA construct comprising a CRISPR multi-clonal site, said multi-clonal site comprising: a) at least two distinct cloning tag (cTAG), wherein each cTAG comprises: i) one or more validated CRISPR landing sites, each comprising a protospacer sequence operably linked to a protospacer adjacent motif (PAM); wherein at least one of said validated CRISPR landing sites is unique within the modular CRISPR DNA construct; and b) one or more DNA insert part(s); i) wherein each of said distinct cTAGs are distributed in flanking positions around each of the one or more DNA insert part(s).

[0037] In some embodiments, the disclosure provides for a method for preparing a recombinant nucleic acid molecule, the method comprising: a) incubating a mixture comprising: i) a plurality of DNA insert parts flanked by two cloning tags (cTAGs), each cTAG comprising: 1) one or more validated CRISPR landing sites, each comprising a protospacer sequence operably linked to a protospacer adjacent motif (PAM); and 2) a rare (≥8 base) restriction enzyme recognition site; wherein at least one of the cTAGs of at least two insert parts comprise the same restriction enzyme site; ii) one or more restriction enzymes targeting the rare restriction enzyme sites in at least two of the plurality of DNA insert parts; under conditions which allow for digestion of the targeted cTAG by the one or more restriction enzymes in at least two of the plurality of DNA insert parts to generate insert parts with digested DNA ends; and b) incubating the DNA insert part(s) with digested DNA ends generated in step (a) under conditions which allow for the covalent joining of the digested DNA ends; wherein the resulting recombinant nucleic acid molecule comprises the complete cTAG sequences of the original insert parts that are covalently joined in the method.

[0038] In some embodiments, the disclosure provides for a method for DNA sequence editing, said method comprising: a) providing: i) the modular CRISPR DNA construct of claim 1, wherein at least two of the distinct cTAGs comprise a rare (≥8 base) restriction enzyme recognition site; ii) a replacement DNA insert part, wherein said replacement DNA insert part is flanked by a first and second insert cTAG; 1) wherein the first insert cTAG comprises the rare restriction enzyme recognition site of one of the distinct cTAGs of the modular CRISPR DNA construct, and the second insert cTAG comprises the rare restriction enzyme recognition site of another distinct cTAG of the modular CRISPR DNA construct; and iii) one or more restriction enzymes targeting the rare restriction enzyme sites in the first and second insert cTAGs; wherein parts (i) and (ii) are each incubated with part (iii) in a single or separate reactions; wherein the one or more restriction enzymes cleave the rare restriction enzyme recognition sites of first and second insert cTAGs and their corresponding distinct cTAGs to generate digested DNA ends, and b) incubating the replacement DNA insert part and modular CRISPR DNA construct with digested DNA ends generated in step (a) under conditions which allow for the covalent joining of the digested DNA ends; wherein the resulting edited modular CRISPR DNA construct comprises the complete cTAG sequences of the original insert part that is covalently joined by the method.

[0039] In some embodiments, the disclosure provides for a method for preparing a recombinant nucleic acid molecule, the method comprising: a) incubating a mixture comprising: i) a plurality of DNA insert parts, wherein each DNA insert part is flanked by two cloning tags (cTAGs), each cTAG comprising: 1) one or more validated CRISPR landing sites, each comprising a protospacer sequence operably linked to a protospacer adjacent motif (PAM); wherein at least two of the DNA insert parts share the same cTAG; ii) a single stranded DNA (ssDNA) exonuclease; under conditions which allow for digestion of the shared cTAG in the least two DNA insert parts, thereby generating compatible overhang DNA ends in the at least two DNA insert parts, and b) incubating the DNA insert parts with digested cTAGs generated in (a) under conditions which allow for the hybridization and covalent joining of the compatible overhang DNA ends of the least two DNA insert parts; wherein the resulting recombinant nucleic acid molecule comprises the complete cTAG sequences of the shared cTAG before digestion. This reaction can also be conducted with a polymerase and or ligase that are used to fix junctions. Further, this can be carried out with a predigested vector.

[0040] In some embodiments, the present disclosure teaches a recombinant modular CRISPR DNA construct for modulating the expression of a host cell gene or engineering the host cell's genome, said construct comprising a CRISPR multi-clonal site, said multi-clonal site comprising: a) at least two distinct cloning tags (cTAGs), wherein each cTAG comprises: i) one or more validated CRISPR landing sites, each comprising a protospacer sequence operably linked to a protospacer adjacent motif (PAM); wherein at least one of said validated CRISPR landing sites is unique within the modular CRISPR DNA construct; and b) one or more DNA insert part(s); i) wherein each of said distinct cTAGs are distributed in flanking positions around each of the one or more DNA insert part(s); and wherein the one or more DNA insert part(s) comprises DNA for a modulator of CRISPR function.

[0041] In some embodiments, the recombinant modular CRISPR DNA construct of the present disclosure comprises the DNA encoding for a modulator of CRISPR function further comprises a selectable marker.

[0042] In some embodiments, the present disclosure teaches a recombinant modular CRISPR DNA construct wherein the modulator of CRISPR function is selected from the group consisting of: an origin of replication, a selectable marker, a counterselectable marker, an anti-CRISPR protein, a promoter, a terminator, a dCas protein, a dCpf1 protein, a barcode, a Cas9 protein, a Cpf1 protein, a DNA donor, and a protein that facilitates multiplexing.

[0043] In some embodiments, the present disclosure teaches a host cell comprising the recombinant modular CRISPR DNA construct as described in this specification.

[0044] In some embodiments, the present disclosure teaches a host cell, wherein the host cell comprises a nucleic acid molecule encoding a catalytically active CRISPR enzyme and a guide RNA capable of recruiting the catalytically activated CRISPR enzyme to a DNA target site. In some embodiments, the present disclosure teaches a host cell, wherein the host cell comprises a nucleic acid molecule encoding a catalytically inactivated CRISPR enzyme and a guide RNA capable of recruiting the catalytically inactivated CRISPR enzyme to a DNA target site.

[0045] In some embodiments, the present disclosure teaches a host cell, wherein the catalytically inactivated CRISPR enzyme is fused to a transcriptional activation protein.

[0046] In some embodiments, the present disclosure teaches a host cell, wherein the host cell further comprises nucleic acid molecule encoding a transcriptional activation protein that, when expressed, is capable of attaching itself to the catalytically inactivated CRISPR enzyme.

[0047] In some embodiments, the present disclosure teaches a host cell, wherein the transcriptional activation protein attaches itself to the catalytically inactivated CRISPR enzyme via a linking aptamer, or through protein-protein interactions.

[0048] In some embodiments, the present disclosure teaches a host cell, wherein the guide RNA is operably linked to an aptamer capable of attaching itself to a transcriptional activation protein.

[0049] In some embodiments, the present disclosure teaches a host cell, wherein the transcriptional activation protein is selected from the group consisting of: VP16, VP64, and VP160.

[0050] In some embodiments, the present disclosure teaches a recombinant modular CRISPR DNA construct, wherein said modular CRISPR DNA construct is circular.

[0051] In some embodiments, the present disclosure teaches a recombinant modular CRISPR DNA construct, wherein said modular CRISPR DNA construct is linear.

[0052] In some embodiments, the present disclosure teaches a recombinant modular CRISPR DNA construct, wherein said modular CRISPR DNA construct is integrated into the genome of an organism.

[0053] In some embodiments, the present disclosure teaches a recombinant modular CRISPR DNA construct, wherein at least one of said distinct cTAGs comprises at least two validated CRISPR landing sites.

[0054] In some embodiments, the present disclosure teaches a recombinant modular CRISPR DNA construct, wherein at least one of the CRISPR landing sites is for a Cas9 endonuclease.

[0055] In some embodiments, the present disclosure teaches a recombinant modular CRISPR DNA construct, wherein at least one of the CRISPR landing sites is for a Cpf1 endonuclease.

[0056] In some embodiments, the present disclosure teaches a recombinant modular CRISPR DNA construct, wherein at least one of said distinct cTAGs comprises a rare (≥8 bases long) restriction endonuclease site.

[0057] In some embodiments, the present disclosure teaches a recombinant modular CRISPR DNA construct, wherein the catalytically inactivated CRISPR enzyme is a mutated Cas9 endonuclease.

[0058] In some embodiments, the present disclosure teaches a recombinant modular CRISPR DNA construct, wherein the catalytically inactivated CRISPR enzyme is a mutated Cpf1 endonuclease.

[0059] In some embodiments, the present disclosure teaches a host cell, wherein the host cell comprises more than one nucleic acid guide RNA.

[0060] In some embodiments, the present disclosure teaches a host cell, wherein at least one of the guide RNAs comprises a different sequence than another guide RNA.

[0061] In some embodiments, the present disclosure teaches a host cell, wherein at least one of the guide RNAs targets a different DNA target site sequence than another guide RNA.

[0062] In some embodiments, the present disclosure teaches a host cell, wherein the host cell comprises more than one catalytically inactivated CRISPR enzyme.

[0063] In some embodiments, the present disclosure teaches a host cell, wherein at least one of the catalytically inactivated CRISPR enzymes comprises a different sequence than another catalytically inactivated CRISPR enzyme encoded in the construct.

[0064] In some embodiments, the present disclosure teaches insert parts, wherein one or more of the cTAGs is selected from the group consisting of SEQ ID NO: 65-74, 78-81, and combinations thereof.

[0065] In some embodiments, the present disclosure teaches a high throughput method of modulating the expression of one or more host cell genes, said method comprising the step of introducing the recombinant modular CRISPR DNA construct of the present disclosure into a host cell; wherein a DNA target site of a guide RNA is located within the host cell genome.

[0066] In some embodiments, the present disclosure teaches a high throughput method of modulating the expression of one or more host cell genes, wherein at least one insert part of the recombinant modular CRISPR DNA construct is integrated into the genome of the host cell.

[0067] In some embodiments, the present disclosure teaches a high throughput method of modulating the expression of one or more host cell genes, wherein the insert part regulates the function of a CRISPR protein.

[0068] In some embodiments, the present disclosure teaches a high throughput method of modulating the expression of one or more host cell genes, wherein the insert part regulates the function of a gRNA.

[0069] In some embodiments, the present disclosure teaches a high throughput method of modulating the expression of one or more host cell genes, wherein the recombinant modular CRISPR DNA construct remains in the host cell as extra chromosomal DNA.

[0070] In some embodiments, the present disclosure teaches a recombinant modular CRISPR DNA construct for screening CRISPR enzyme variants, said construct comprising a CRISPR multi-clonal site, said multi-clonal site comprising: a) at least two distinct cloning tags (cTAGs), wherein each cTAG comprises: i) one or more validated CRISPR landing sites, each comprising a protospacer sequence operably linked to a protospacer adjacent motif (PAM); wherein at least one of said validated CRISPR landing sites is unique within the modular CRISPR DNA construct; and b) one or more DNA insert part(s); i) wherein each of said distinct cTAGs are distributed in flanking positions around each of the one or more DNA insert part(s); wherein the construct further comprises: c) a first nucleic acid encoding a CRISPR enzyme, or an enzyme suspected of having CRISPR functionality (“putative CRISPR enzyme”); and d) a second nucleic acid encoding a guide RNA capable of binding to a DNA target site.

[0071] In some embodiments, the present disclosure teaches a high throughput method of screening CRISPR activity in a host cell, said method comprising the steps of: a) introducing the recombinant modular CRISPR DNA construct of the present disclosure into the host cell; wherein the DNA target site of a guide RNA is located within the host cell genome; and b) measuring the degree of DNA cleavage occurring at the DNA target site.

[0072] In some embodiments, the present disclosure teaches a high throughput method of screening CRISPRi and/or CRISPRa activity in a host cell, said method comprising the steps of: a) introducing the recombinant modular CRISPR DNA construct of the present disclosure into the host cell; wherein the DNA target site of a guide RNA is located within the host cell genome; and b) measuring the degree of transcriptional modulation occurring at the DNA target site.

### BRIEF DESCRIPTION OF THE FIGURES

[0073] FIG. 1 A-C Illustrates a comparison of the CRISPR/Cas9 and CRISPR/Cpf1 systems of the present disclosure. FIG. 1A—Cas9 endonucleases are recruited to target dsDNA by tracrRNA and crRNA complexes. FIG. 1B—Cas9 endonucleases may also be recruited to target dsDNA by artificially fused tracrRNA and crRNA sequences known as single-guide RNAs (sgRNAs). Cas9 endonuclease produces blunt ends. FIG. 1C—Cpf1 endonucleases only require crRNA guide poly-ribonucleotides. Cpf1 endonuclease cleavage produces double stranded breaks with 5′ overhangs.

[0074] FIG. 2 A-C Illustrates an embodiment of the present cloning methods utilizing modular CRISPR constructs of the present disclosure. FIG. 2A—diagrams a modular CRISPR plasmid that can be easily altered with Cas9 or Cpf1 nucleases, according to the present disclosure. As aforementioned, the modular CRISPR constructs of the disclosure can be termed “MegaModular” constructs. Interchangeable parts represented by numbers are flanked by invariant cTAG sequences represented by letters. Parts may come pre-assembled, or may be assembled in vitro based on cTAG sequence identity. Example insert parts are shown on the right of FIG. 2A. FIG. 2B—Several strategies such as Cas9, Cpf1, or restriction endonuclease cleavage at cTAGs may be used to replace individual parts without having to reassemble the entire plasmid. cTAG sequences may comprise one or more cloning sites, including, but not limited to Cas9, Cpf1, restriction, and/or recombination sites. FIG. 2C—Once integrated into the genome of an organism, cTAGs may continue to serve as pre-validated Cas9 or Cpf1 landing sites, enabling replacement, insertion, or removal of genomically integrated DNA with prevalidated and orthogonal gRNA sequences.

[0075] FIG. 3 A-D Illustrates an embodiment of the present cloning methods utilizing modular CRISPR constructs of the present disclosure. FIG. 3A—diagrams a modular CRISPR plasmid that can be easily altered with Cas9 or Cpf1 nucleases, according to present disclosure. Interchangeable parts represented by numbers are flanked by invariant cTAG sequences represented by letters. Parts may come pre-assembled, or may be assembled in vivo or in vitro based on cTAG sequence identity. Example insert parts are shown on the right of FIG. 3A. FIG. 3B—Several strategies such as Cas9, Cpf1, or restriction endonuclease cleavage at cTAGs may be used to replace individual parts without having to reassemble the entire plasmid. cTAG sequences may comprise one or more cloning sites, including, but not limited to Cas9, Cpf1, restriction, and/or recombination sites. FIG. 3C—Illustrates methods of the present disclosure for removing insert parts, or for adding stuffer sequences from existing modular plasmids. FIG. 3D—Insert parts of the modular plasmids of the present disclosure may serve as sequences for genomic integration of a portion or the whole of the modular CRISPR vectors into the genome of a host cell.

[0076] FIG. 4 Illustrates the one-pot in vitro modular CRISPR cloning of Example 1. Specifically, the generation of plasmid 13001009086 by transfer of an insert from one plasmid to another in a one-pot reaction is shown. The details of this reaction are set forth in Example 1.

[0077] FIG. 5 Illustrates an embodiment of the in vitro modular CRISPR cloning methods of Example 2. Each panel provides an illustration of the experimental design described in Example 2. A chloramphenicol resistance gene was cloned into a kanamycin resistant backbone plasmid to create a dual resistance plasmid. Dual resistance plasmids were then transformed into bacteria, which was subsequently cultured in media augmented with kanamycin and chloramphenicol antibiotics. Resistant colonies indicated successful Cpf1 cloning assemblies.

[0078] FIG. 6 Illustrates the results of the in vitro modular CRISPR cloning methods of Example 2. The y-axis represents the number of recovered colonies growing in media augmented with kanamycin and chloramphenicol. Resistant colonies indicate successful Cpf1 cloning assemblies. The results showed a ligase-dependent assembly of dual resistance plasmids.

[0079] FIG. 7 Depicts the vector map for pJDI427. CRISPR landing sites used in the Cpf1 assembly are labeled as cTAG M and cTAG N. Relevant sequence information can be found in SEQ ID NO: 102.

[0080] FIG. 8 Depicts the vector map for pJDI429. CRISPR landing sites used in the Cpf1 assembly are labeled as cTAG N and cTAG O. Relevant sequence information can be found in SEQ ID NO: 103.

[0081] FIG. 9 Depicts the vector map for pJDI430. CRISPR landing sites used in the Cpf1 assembly are labeled as cTAG P and cTAG N. Relevant sequence information can be found in SEQ ID NO: 104.

[0082] FIG. 10 Depicts the vector map for pJDI431. CRISPR landing sites used in the Cpf1 assembly are labeled as cTAG P and cTAG O. Relevant sequence information can be found in SEQ ID NO: 105.

[0083] FIG. 11 Depicts the vector map for pJDI432. CRISPR landing sites used in the Cpf1 assembly are labeled as cTAG M and cTAG N. Relevant sequence information can be found in SEQ ID NO: 106.

[0084] FIG. 12 Depicts the vector map for pJDI434. CRISPR landing sites used in the Cpf1C assembly are labeled as cTAG N and cTAG O. Relevant sequence information can be found in SEQ ID NO: 107.

[0085] FIG. 13 Depicts the vector map for pJDI435. CRISPR landing sites used in the Cpf1 assembly are labeled as cTAG P and cTAG N. Relevant sequence information can be found in SEQ ID NO: 108.

[0086] FIG. 14 Depicts the vector map for pJDI436. CRISPR landing sites used in the Cpf1 assembly are labeled as cTAG P and cTAG O. Relevant sequence information can be found in SEQ ID NO: 109.

[0087] FIG. 15 Illustrates an example gene editing of a modular CRISPR construct, according to the methods of the present disclosure. Specifically, FIG. 15 illustrates a plasmid assembly by restriction enzyme digestion and ligation using the megamodular design of Example 3. FIG. 15 shows that a modular CRISPR plasmid backbone p1300283391 and a compatible GFP-containing insert DNA part are each digested with ApaI and PvuI restriction enzymes to create compatible cloning tag ends. The digested backbone and insert are ligated in vitro to create a new modular CRISPR construct.

[0088] FIG. 16 Is a diagram illustrating the gRNA-directed binding of dCas9 to DNA.

[0089] FIG. 17 A-B Depicts CRISPRi technology validation in Corynebacterium glutamicum as described in Example 5. FIG. 17A—is diagram of the dCas9 expression vector leading to transcriptional inactivation of a target gene. FIG. 17B—depicts the repression of gene transcription using a dCas9 expressed concurrently with various guide RNAs expressed in a WT or paprika producing strain. The median fluorescence of live gated cells, for 7 biological replicates, is shown.

[0090] FIG. 18 A-B Illustrates the potential for CRISPRi/CRISPRa libraries. FIG. 18A—depicts CRISPRi/CRISPRa libraries targeting a single promoter. FIG. 18B—depicts CRISPRi/CRISPRa libraries targeting a multiple promoters throughout the genome.

### DETAILED DESCRIPTION

### Definitions

[0091] While the following terms are believed to be well understood by one of ordinary skill in the art, the following definitions are set forth to facilitate explanation of the presently disclosed subject matter.

[0092] The term “a” or “an” refers to one or more of that entity, i.e., can refer to a plural referent. As such, the terms “a” or “an”, “one or more” and “at least one” are used interchangeably herein. In addition, reference to “an element” by the indefinite article “a” or “an” does not exclude the possibility that more than one of the elements is present, unless the context clearly requires that there is one and only one of the elements.

[0093] The term “prokaryotes” is art recognized and refers to organisms that do not contain a nucleus. The prokaryotes are generally classified in one of two domains, the Bacteria and the Archaea. The definitive difference between organisms of the Archaea and Bacteria domains is based on fundamental differences in the nucleotide base sequence in the 16S ribosomal RNA.

[0094] A “eukaryote” is any organism whose cells contain a nucleus and other organelles enclosed within membranes. Eukaryotes belong to the taxon Eukarya or Eukaryota. The defining feature that sets eukaryotic cells apart from prokaryotic cells (the aforementioned Bacteria and Archaea) is that they have membrane-bound organelles, especially the nucleus, which contains the genetic material, and is enclosed by the nuclear envelope.

[0095] The term “Archaea” refers to a categorization of organisms of the division Mendosicutes, typically found in unusual environments and distinguished from the rest of the prokaryotes by several criteria, including the number of ribosomal proteins and the lack of muramic acid in cell walls. On the basis of ssrRNA analysis, the Archaea consist of two phylogenetically-distinct groups: Crenarchaeota and Euryarchaeota. On the basis of their physiology, the Archaea can be organized into three types: methanogens (prokaryotes that produce methane); extreme halophiles (prokaryotes that live at very high concentrations of salt (NaCl)); and extreme (hyper) thermophilus (prokaryotes that live at very high temperatures). Besides the unifying archaeal features that distinguish them from Bacteria (i.e., no murein in cell wall, ester-linked membrane lipids, etc.), these prokaryotes exhibit unique structural or biochemical attributes which adapt them to their particular habitats. The Crenarchaeota consists mainly of hyperthermophilic sulfur-dependent prokaryotes and the Euryarchaeota contains the methanogens and extreme halophiles.

[0096] “Bacteria” or “eubacteria” refers to a domain of prokaryotic organisms. Bacteria include at least 11 distinct groups as follows: (1) Gram-positive (gram+) bacteria, of which there are two major subdivisions: (1) high G+C group (Actinomycetes, Mycobacteria, Micrococcus, others) (2) low G+C group (Bacillus, Clostridia, Lactobacillus, Staphylococci, Streptococci, Mycoplasmas); (2) Proteobacteria, e.g., Purple photosynthetic+non-photosynthetic Gram-negative bacteria (includes most “common” Gram-negative bacteria); (3) Cyanobacteria, e.g., oxygenic phototrophs; (4) Spirochetes and related species; (5) Planctomyces; (6) Bacteroides, Flavobacteria; (7) Chlamydia; (8) Green sulfur bacteria; (9) Green non-sulfur bacteria (also anaerobic phototrophs); (10) Radioresistant micrococci and relatives; (11) Thermotoga and Thermosipho thermophiles.

[0097] The terms “genetically modified host cell,” “recombinant host cell,” and “recombinant strain” are used interchangeably herein and refer to host cells that have been genetically modified by the cloning and transformation methods of the present disclosure. Thus, the terms include a host cell (e.g., bacteria, yeast cell, fungal cell, CHO, human cell, etc.) that has been genetically altered, modified, or engineered, such that it exhibits an altered, modified, or different genotype and/or phenotype (e.g., when the genetic modification affects coding nucleic acid sequences of the microorganism), as compared to the naturally-occurring microorganism from which it was derived. It is understood that the terms refer not only to the particular recombinant microorganism in question, but also to the progeny or potential progeny of such a microorganism.

[0098] The term “genetically engineered” may refer to any manipulation of a host cell's genome (e.g. by insertion or deletion of nucleic acids).

[0099] As used herein, “selectable marker” is a nucleic acid segment that allows one to select for a molecule (e.g., a replicon) or a cell that contains it, often under particular conditions. These markers can encode an activity, such as, but not limited to, production of RNA, peptide, or protein, or can provide a binding site for RNA, peptides, proteins, inorganic and organic compounds or compositions and the like. Examples of selectable markers include but are not limited to: (1) nucleic acid segments that encode products which provide resistance against otherwise toxic compounds (e.g., antibiotics); (2) nucleic acid segments that encode products which are otherwise lacking in the recipient cell (e.g., tRNA genes, auxotrophic markers); (3) nucleic acid segments that encode products which suppress the activity of a gene product; (4) nucleic acid segments that encode products which can be readily identified (e.g., phenotypic markers such as β-galactosidase, green fluorescent protein (GFP), yellow fluorescent protein (YFP), cyan fluorescent protein (CFP), and cell surface proteins); (5) nucleic acid segments that encode products that bind other products which are otherwise detrimental to cell survival and/or function; (6) nucleic acid segments that encode nucleic acids that otherwise inhibit the activity of any of the nucleic acid segments resulting in a visible or selectable phenotype (e.g., antisense oligonucleotides); (7) nucleic acid segments that encode products that bind other products that modify a substrate (e.g. restriction endonucleases); (8) nucleic acid segments that can be used to isolate or identify a desired molecule (e.g. specific protein binding sites); (9) nucleic acid segments that encode a specific nucleotide sequence which can be otherwise non-functional (e.g., for PCR amplification of subpopulations of molecules); and (10) nucleic acid segments, which when absent, directly or indirectly confer resistance or sensitivity to particular compounds.

[0100] As used herein, “counterselectable marker” or a “counterselection marker” is a nucleic acid segment that eliminates or inhibits growth of a host organism upon selection. In some embodiments, the counterselectable markers of the present disclosure render the cells sensitive to one or more chemicals/growth conditions/genetic backgrounds. In some embodiments, the counterselectable markers of the present disclosure are toxic genes. In some embodiments, the counterselectable markers are expressed by inducible promoters.

[0101] As used herein, the term “nucleic acid” refers to a polymeric form of nucleotides of any length, either ribonucleotides or deoxyribonucleotides, or analogs thereof. This term refers to the primary structure of the molecule, and thus includes double- and single-stranded DNA, as well as double- and single-stranded RNA. It also includes modified nucleic acids such as methylated and/or capped nucleic acids, nucleic acids containing modified bases, backbone modifications, and the like. The terms “nucleic acid” and “nucleotide sequence” are used interchangeably.

[0102] As used herein, the term “gene” refers to any segment of DNA associated with a biological function. Thus, genes include, but are not limited to, coding sequences and/or the regulatory sequences required for their expression. Genes can also include non-expressed DNA segments that, for example, form recognition sequences for other proteins. Genes can be obtained from a variety of sources, including cloning from a source of interest or synthesizing from known or predicted sequence information, and may include sequences designed to have desired parameters.

[0103] As used herein, the term “homologous” or “homolog” or “ortholog” is known in the art and refers to related sequences that share a common ancestor or family member and are determined based on the degree of sequence identity. The terms “homology,” “homologous,” “substantially similar” and “corresponding substantially” are used interchangeably herein. They refer to nucleic acid fragments wherein changes in one or more nucleotide bases do not affect the ability of the nucleic acid fragment to mediate gene expression or produce a certain phenotype. These terms also refer to modifications of the nucleic acid fragments of the instant disclosure such as deletion or insertion of one or more nucleotides that do not substantially alter the functional properties of the resulting nucleic acid fragment relative to the initial, unmodified fragment. It is therefore understood, as those skilled in the art will appreciate, that the disclosure encompasses more than the specific exemplary sequences. These terms describe the relationship between a gene found in one species, subspecies, variety, cultivar or strain and the corresponding or equivalent gene in another species, subspecies, variety, cultivar or strain. For purposes of this disclosure, homologous sequences are compared. “Homologous sequences” or “homologs” or “orthologs” are thought, believed, or known to be functionally related. A functional relationship may be indicated in any one of a number of ways, including, but not limited to: (a) degree of sequence identity and/or (b) the same or similar biological function. Preferably, both (a) and (b) are indicated. Homology can be determined using software programs readily available in the art, such as those discussed in Current Protocols in Molecular Biology (F. M. Ausubel et al., eds., 1987) Supplement 30, section 7.718, Table 7.71. Some alignment programs are MacVector (Oxford Molecular Ltd, Oxford, U.K.), ALIGN Plus (Scientific and Educational Software, Pennsylvania) and AlignX (Vector NTI, Invitrogen, Carlsbad, Calif.). Another alignment program is Sequencher (Gene Codes, Ann Arbor, Mich.), using default parameters.

[0104] As used herein, the term “nucleotide change” refers to, e.g., nucleotide substitution, deletion, and/or insertion, as is well understood in the art. For example, mutations contain alterations that produce silent substitutions, additions, or deletions, but do not alter the properties or activities of the encoded protein or how the proteins are made.

[0105] As used herein, the term “protein modification” refers to, e.g., amino acid substitution, amino acid modification, deletion, and/or insertion, as is well understood in the art.

[0106] As used herein, the term “at least a portion” or “fragment” of a nucleic acid or polypeptide means a portion having the minimal size characteristics of such sequences, or any larger fragment of the full length molecule, up to and including the full length molecule. A fragment of a polynucleotide of the disclosure may encode a biologically active portion of a genetic regulatory element. A biologically active portion of a genetic regulatory element can be prepared by isolating a portion of one of the polynucleotides of the disclosure that comprises the genetic regulatory element and assessing activity as described herein. Similarly, a portion of a polypeptide may be 4 amino acids, 5 amino acids, 6 amino acids, 7 amino acids, and so on, going up to the full length polypeptide. The length of the portion to be used will depend on the particular application. A portion of a nucleic acid useful as a hybridization probe may be as short as 12 nucleotides; in some embodiments, it is 20 nucleotides. A portion of a polypeptide useful as an epitope may be as short as 4 amino acids. A portion of a polypeptide that performs the function of the full-length polypeptide would generally be longer than 4 amino acids.

[0107] For PCR amplifications of the polynucleotides disclosed herein, oligonucleotide primers can be designed for use in PCR reactions to amplify corresponding DNA sequences from cDNA or genomic DNA extracted from any organism of interest. Methods for designing PCR primers and PCR cloning are generally known in the art and are disclosed in Sambrook et al. (2001) Molecular Cloning: A Laboratory Manual (3rd ed., Cold Spring Harbor Laboratory Press, Plainview, N.Y.). See also Innis et al., eds. (1990) PCR Protocols: A Guide to Methods and Applications (Academic Press, New York); Innis and Gelfand, eds. (1995) PCR Strategies (Academic Press, New York); and Innis and Gelfand, eds. (1999) PCR Methods Manual (Academic Press, New York). Known methods of PCR include, but are not limited to, methods using paired primers, nested primers, single specific primers, degenerate primers, gene-specific primers, vector-specific primers, partially-mismatched primers, and the like.

[0108] The term “primer” as used herein refers to an oligonucleotide which is capable of annealing to the amplification target allowing a DNA polymerase to attach, thereby serving as a point of initiation of DNA synthesis when placed under conditions in which synthesis of primer extension product is induced, i.e., in the presence of nucleotides and an agent for polymerization such as DNA polymerase and at a suitable temperature and pH. The (amplification) primer is preferably single stranded for maximum efficiency in amplification. Preferably, the primer is an oligodeoxyribonucleotide. The primer must be sufficiently long to prime the synthesis of extension products in the presence of the agent for polymerization. The exact lengths of the primers will depend on many factors, including temperature and composition (A/T vs. G/C content) of primer. A pair of bi-directional primers consists of one forward and one reverse primer as commonly used in the art of DNA amplification such as in PCR amplification.

[0109] The terms “stringency” or “stringent hybridization conditions” refer to hybridization conditions that affect the stability of hybrids, e.g., temperature, salt concentration, pH, formamide concentration and the like. These conditions are empirically optimized to maximize specific binding and minimize non-specific binding of primer or probe to its target nucleic acid sequence. The terms as used include reference to conditions under which a probe or primer will hybridize to its target sequence, to a detectably greater degree than other sequences (e.g. at least 2-fold over background). Stringent conditions are sequence dependent and will be different in different circumstances. Longer sequences hybridize specifically at higher temperatures. Generally, stringent conditions are selected to be about 5° C. lower than the thermal melting point (Tm) for the specific sequence at a defined ionic strength and pH. The Tm is the temperature (under defined ionic strength and pH) at which 50% of a complementary target sequence hybridizes to a perfectly matched probe or primer. Typically, stringent conditions will be those in which the salt concentration is less than about 1.0 M Na+ ion, typically about 0.01 to 1.0 M Na+ ion concentration (or other salts) at pH 7.0 to 8.3 and the temperature is at least about 30° C. for short probes or primers (e.g. 10 to 50 nucleotides) and at least about 60° C. for long probes or primers (e.g. greater than 50 nucleotides). Stringent conditions may also be achieved with the addition of destabilizing agents such as formamide. Exemplary low stringent conditions or “conditions of reduced stringency” include hybridization with a buffer solution of 30% formamide, 1 M NaCl, 1% SDS at 37° C. and a wash in 2×SSC at 40° C. Exemplary high stringency conditions include hybridization in 50% formamide, 1M NaCl, 1% SDS at 37° C., and a wash in 0.1×SSC at 60° C. Hybridization procedures are well known in the art and are described by e.g. Ausubel et al., 1998 and Sambrook et al., 2001. In some embodiments, stringent conditions are hybridization in 0.25 M Na2HPO4 buffer (pH 7.2) containing 1 mM Na2EDTA, 0.5-20% sodium dodecyl sulfate at 45° C., such as 0.5%, 1%, 2%, 3%, 4%, 5%, 6%, 7%, 8%, 9%, 10%, 11%, 12%, 13%, 14%, 15%, 16%, 17%, 18%, 19% or 20%, followed by a wash in 5×SSC, containing 0.1% (w/v) sodium dodecyl sulfate, at 55° C. to 65° C.

[0110] As used herein, the term “substantially identical” refers to two polynucleotide sequences that vary in no more than 1, 2, 3, 4, 5, 6, or 7 nucleotides. When used in the context of cTAGs, the term substantially identical denotes two cTAGs that would be identical, except for a mutation in the PAM or protospacer region of on one of the cTAGs designed to abrogate CRISPR cleavage in at least one CRISPR landing site. When the term substantially identical is used in conjunction with the term “partial” sequence or cTAG, the combination refers to the comparison between two substantially identical cTAGs as described above, wherein one of the cTAGs has been digested by a CRISPR endonuclease. Thus the term would be used to indicate that the cTAG being described was identical to a second cTAG (in its undigested form), except for the mutation in the PAM or protospacer region.

[0111] As used herein, the term “promoter” refers to a DNA sequence capable of controlling the expression of a coding sequence or functional RNA. The promoter sequence may consist of proximal and more distal upstream elements, the latter elements often referred to as enhancers. Accordingly, an “enhancer” is a DNA sequence that can stimulate promoter activity, and may be an innate element of the promoter or a heterologous element inserted to enhance the level or tissue specificity of a promoter.

[0112] As used herein, the term “heterologous” refers to a nucleic acid sequence that is not naturally found in the particular organism.

[0113] As used herein, the term “endogenous,” “endogenous gene,” refers to the naturally occurring copy of a gene.

[0114] As used herein, the term “naturally occurring” refers to a gene or sequence derived from a naturally occurring source. In some embodiments, a naturally occurring gene refers to a gene of a wild type (non-transgene) gene, whether located in its endogenous setting within the source organism, or if placed in a “heterologous” setting, when introduced in a different organism. Thus, for the purposes of this disclosure, a “non-naturally occurring” sequence is a sequence that has been synthesized, mutated, or otherwise modified to have a different sequence from known natural sequences. In some embodiments, the modification may be at the protein level (e.g., amino acid substitutions). In other embodiments, the modification may be at the DNA level, without any effect on protein sequence (e.g., codon optimization). In some embodiments, the non-naturally occurring sequence may be a construct.

[0115] As used herein, the term “exogenous” is used interchangeably with the term “heterologous,” and refers to a substance coming from some source other than its native source. For example, the terms “exogenous protein,” or “exogenous gene” refer to a protein or gene from a non-native source or location, and that have been artificially supplied to a biological system. Artificially mutated variants of endogenous genes are considered “exogenous” for the purposes of this disclosure.

[0116] As used herein, the phrases “recombinant construct”, “expression construct”, “chimeric construct”, “construct”, and “recombinant DNA construct” are used interchangeably herein. A recombinant construct comprises an artificial combination of nucleic acid fragments, e.g., regulatory and coding sequences that are not found together in nature. For example, a chimeric construct may comprise regulatory sequences and coding sequences that are derived from different sources, or regulatory sequences and coding sequences derived from the same source, but arranged in a manner different than that found in nature. Such construct may be used by itself or may be used in conjunction with a vector. If a vector is used then the choice of vector is dependent upon the method that will be used to transform host cells as is well known to those skilled in the art. For example, a plasmid vector can be used. The skilled artisan is well aware of the genetic elements that must be present on the vector in order to successfully transform, select and propagate host cells comprising any of the isolated nucleic acid fragments of the disclosure. The skilled artisan will also recognize that different independent transformation events will result in different levels and patterns of expression (Jones et al., (1985) EMBO J. 4:2411-2418; De Almeida et al., (1989) Mol. Gen. Genetics 218:78-86), and thus that multiple events must be screened in order to obtain lines displaying the desired expression level and pattern. Such screening may be accomplished by Southern analysis of DNA, Northern analysis of mRNA expression, immunoblotting analysis of protein expression, or phenotypic analysis, among others. Vectors can be plasmids, viruses, bacteriophages, pro-viruses, phagemids, transposons, artificial chromosomes, and the like, that replicate autonomously or can integrate into a chromosome of a host cell. A vector can also be a naked RNA polynucleotide, a naked DNA polynucleotide, a polynucleotide composed of both DNA and RNA within the same strand, a poly-lysine-conjugated DNA or RNA, a peptide-conjugated DNA or RNA, a liposome-conjugated DNA, or the like, that is not autonomously replicating. As used herein, the term “expression” refers to the production of a functional end-product e.g., an mRNA or a protein (precursor or mature).

[0117] The term “operably linked” means, in the context the sequential arrangement of the promoter polynucleotide according to the disclosure with a further oligo- or polynucleotide, resulting in transcription of said further polynucleotide. In some embodiments, the promoter sequences of the present disclosure are inserted just prior to a gene's 5′UTR, or open reading frame. In other embodiments, the operably linked promoter sequences and gene sequences of the present disclosure are separated by one or more linker nucleotides. The term “operably linked” in the context of CRISPR protospacers and prospacer adjacent motifs (PAMs) refers to a proximately placed protospacer/PAM combination sequence that is capable of being cleaved at high efficiency by a CRISPR endonuclease complex. The term “operably linked” in the context of guide RNA/aptamers refers to a guide RNA that is capable of recruiting a CRISPR endonuclease to a DNA target site, while also recruiting a second effector peptide via its aptamer sequence (e.g., capable of recruiting the transcriptional activation domain targeted by the aptamer). The term “operably linked” in the context of the terminator sequences, means the arrangement of the terminator sequence to end transcription of an upstream sequence. In some embodiments, the terminator sequences are placed at the end of a gene or operon.

[0118] The term “CRISPR RNA” or “crRNA” refers to the RNA strand responsible for hybridizing with target DNA sequences, and recruiting CRISPR endonucleases. crRNAs may be naturally occurring, or may be synthesized according to any known method of producing RNA.

[0119] The term “guide sequence” or “spacer” refers to the portion of a crRNA or guide RNA (gRNA) that is responsible for hybridizing with the target DNA.

[0120] The term “protospacer” refers to the DNA sequence targeted by a crRNA or guide strand. In some embodiments, the protospacer sequence hybridizes with the crRNA guide sequence of a CRISPR complex.

[0121] The term “seed region” refers to the ribonucleic sequence responsible for initial complexation between a DNA sequence CRISPR ribonucleoprotein complex. Mismatches between the seed region and a target DNA sequence have a stronger effect on target site recognition and cleavage than the remainder of the crRNA/sgRNA sequence. In some embodiments, a single mismatch in the seed region of a crRNA/gRNA can render a CRISPR complex inactive at that binding site. In some embodiments, the seed regions for Cas9 endonucleases are located along the last ˜12 nts of the 3′ portion of the guide sequence, which correspond (hybridize) to the portion of the protospacer target sequence that is adjacent to the PAM. In some embodiments, the seed regions for Cpf1 endonucleases are located along the first ˜5 nts of the 5′ portion of the guide sequence, which correspond (hybridize) to the portion of the protospacer target sequence adjacent to the PAM.

[0122] The term “target site” means, in the context of CRISPR, the loci to which the guideRNA (e.g., the single-guide RNA, or tracrRNA) complexes with its corresponding seed region, such that the guide RNA would be capable of recruiting a CRISPR endonuclease (active, or otherwise) to that portion of DNA.

[0123] The term “tracrRNA” refers to a small trans-encoded RNA. TracrRNA is complementary to and base pairs with crRNA to form a crRNA/tracrRNA hybrid, capable of recruiting CRISPR endonucleases to target sequences.

[0124] The term “Guide RNA” or “gRNA” as used herein refers to an RNA sequence or combination of sequences capable of recruiting a CRISPR endonuclease to a target sequence. Thus as used herein, a guide RNA can be a natural or synthetic crRNA (e.g., for Cpf1), a natural or synthetic crRNA/tracrRNA hybrid (e.g., for Cas9), or a single-guide RNA (sgRNA). Claims reciting expression or nucleotides encoding for a guide RNA can therefore refer to expression/encoding of single-guide RNA sequences, crRNA, and/or both crRNA and tracrRNA as distinct molecules.

[0125] The term “CRISPR landing site” as used herein, refers to a DNA sequence capable of being targeted by a CRISPR complex. Thus, in some embodiments, a CRISPR landing site comprises a proximately placed protospacer/Protopacer Adjacent Motif combination sequence that is capable of being cleaved a CRISPR endonuclease complex. The term “validated CRISPR landing site” refers to a CRISPR landing site for which there exists a guide RNA capable of inducing high efficiency cleaving of said sequence. Thus, the term validated should be interpreted as meaning that the sequence has been previously shown to be cleavable by a CRISPR complex. Each “validated CRISPR landing site” will by definition confirm the existence of a tested guide RNA associated with the validation. The term “validated CRISPR landing site” should further be understood to mean that the landing site was artificially designed and added to a DNA sequence with the express purpose of serving as a high efficiency and reliable DNA cleavage target. The “validated CRISPR landing site” of the present disclosure therefore, excludes sequences in previously existing plasmids, that were not originally designed as CRISPR targeting sites, but which are later cleaved through the creation of custom CRISPR complexes targeting regions of the plasmid.

[0126] The term “sticky end(s)” refers to double stranded polynucleotide molecule end that comprises a sequence overhang. In some embodiments, the sticky end can be a dsDNA molecule end with a 5′ or 3′ sequence overhang. In some embodiments, the sticky ends of the present disclosure are capable of hybridizing with compatible sticky ends of the same or other molecules. Thus, in one embodiment, a sticky end on the 3′ of a first DNA fragment may hybridize with a compatible sticky end on a second DNA fragment. In some embodiments, these hybridized sticky ends can be sewn together by a ligase. In other embodiments, the sticky ends might require extension of the overhangs to complete the dsDNA molecule prior to ligation. The term “genetic scar(s)” refers to any undesirable sequence introduced into a nucleic acid sequence by DNA manipulation methods. For example, in some embodiments, the present disclosure teaches genetic scars such as restriction enzyme binding sites, sequence adapters or spacers to accommodate cloning, TA-sites, scars left over from NHEJ, etc. In some embodiments, the present disclosure teaches methods of scarless cloning and gene editing.

[0127] As used herein the term “targeted” refers to the expectation that one item or molecule will interact with another item or molecule with a degree of specificity, so as to exclude non-targeted items or molecules. For example, a first polynucleotide that is targeted to a second polynucleotide, according to the present disclosure has been designed to hybridize with the second polynucleotide in a sequence specific manner (e.g., via Watson-Crick base pairing). In some embodiments, the selected region of hybridization is designed so as to render the hybridization unique to the one, or more targeted regions. A second polynucleotide can cease to be a target of a first targeting polynucleotide, if its targeting sequence (region of hybridization) is mutated, or is otherwise removed/separated from the second polynucleotide.

[0128] The disclosure refers to the taught and described universal modular CRISPR DNA constructs or designs as a “MegaModular” construct or design.

### DNA Nucleases

[0129] In some embodiments, the present disclosure teaches methods and compositions for gene editing/cloning utilizing DNA nucleases. CRISPR complexes, transcription activator-like effector nucleases (TALENs), zinc finger nucleases (ZFNs), and FokI restriction enzymes are some of the sequence-specific nucleases that have been used as gene editing tools. These enzymes are able to target their nuclease activities to desired target loci through interactions with guide regions engineered to recognize sequences of interest. In some embodiments, the present disclosure teaches CRISPR-based gene editing methods

[0130] The principles of in vivo CRISPR-based editing largely rely on natural cellular DNA repair systems. Double-stranded dsDNA breaks introduced by nucleases are repaired by either non-homologous end-joining (NHEJ) or homology-directed repair (HDR), or single strand annealing, (SSA), or microhomology end joining (MMEJ).

[0131] HDR relies on a template DNA containing sequences homologous to the region surrounding the targeted site of DNA cleavage. Cellular repair proteins use the homology between the exogenously supplied or endogenous DNA sequences and the site surrounding a DNA break to repair the dsDNA break, replacing the break with the sequence on the template DNA. Failure to integrate the template DNA however, can result in NHEJ, MMEJ, or SSA. NHEJ, MMEJ and SSA are error-prone processes that are often accompanied by insertion or deletion of nucleotides (indels) at the target site, resulting in genetic knockout (silencing) of the targeted region of the genome due to frameshift mutations or insertions of a premature stop codon. Cpf1-mediated editing can also function via traditional hybridization of overhangs created by the endonuclease, followed by ligation.

[0132] CRISPR endonucleases are also useful for in vitro DNA manipulations, as discussed in later sections of this disclosure.

[0133] CRISPR Systems

[0134] CRISPR (Clustered Regularly Interspaced Short Palindromic Repeats) and CRISPR-associated (cas) endonucleases were originally discovered as adaptive immunity systems evolved by bacteria and archaea to protect against viral and plasmid invasion. Naturally occurring CRISPR/Cas systems in bacteria are composed of one or more Cas genes and one or more CRISPR arrays consisting of short palindromic repeats of base sequences separated by genome-targeting sequences acquired from previously encountered viruses and plasmids (called spacers). (Wiedenheft, B., et. al. Nature. 2012; 482:331; Bhaya, D., et. al., Annu. Rev. Genet. 2011; 45:231; and Terms, M. P. et. al., Curr. Opin. Microbiol. 2011; 14:321). Bacteria and archaea possessing one or more CRISPR loci respond to viral or plasmid challenge by integrating short fragments of foreign sequence (protospacers) into the host chromosome at the proximal end of the CRISPR array. Transcription of CRISPR loci generates a library of CRISPR-derived RNAs (crRNAs) containing sequences complementary to previously encountered invading nucleic acids (Haurwitz, R. E., et. al., Science. 2012:329; 1355; Gesner, E. M., et. al., Nat. Struct. Mol. Biol. 2001:18; 688; Jinek, M., et. al., Science. 2012:337; 816-21). Target recognition by crRNAs occurs through complementary base pairing with target DNA, which directs cleavage of foreign sequences by means of Cas proteins. (Jinek et. al. 2012 “A Programmable dual-RNA-guided DNA endonuclease in adaptive bacterial immunity.” Science. 2012:337; 816-821).

[0135] There are at least five main CRISPR system types (Type I, II, III, IV and V) and at least 16 distinct subtypes (Makarova, K. S., et al., Nat Rev Microbiol. 2015. Nat. Rev. Microbiol. 13, 722-736). CRISPR systems are also classified based on their effector proteins. Class 1 systems possess multi-subunit crRNA-effector complexes, whereas in class 2 systems all functions of the effector complex are carried out by a single protein (e.g., Cas9 or Cpf1). In some embodiments, the present disclosure teaches using type II and/or type V single-subunit effector systems. Thus, in some embodiments, the present disclosure teaches using class 2 CRISPR systems.

[0136] CRISPR/Cas9

[0137] In some embodiments, the present disclosure teaches methods of gene editing using a Type II CRISPR system. In some embodiments, the Type II CRISPR system uses the Cas9 enzyme. Type II systems rely on a i) single endonuclease protein, ii) a transactivating crRNA (tracrRNA), and iii) a crRNA where a ˜20-nucleotide (nt) portion of the 5′ end of crRNA is complementary to a target nucleic acid. The region of a CRISPR crRNA strand that is complementary to its target DNA protospacer is hereby referred to as “guide sequence.”

[0138] In some embodiments, the tracrRNA and crRNA components of a Type II system can be replaced by a single-guide RNA (sgRNA). The sgRNA can include, for example, a nucleotide sequence that comprises an at least 12-20 nucleotide sequence complementary to the target DNA sequence (guide sequence) and can include a common scaffold RNA sequence at its 3′ end. As used herein, “a common scaffold RNA” refers to any RNA sequence that mimics the tracrRNA sequence or any RNA sequences that function as a tracrRNA.

[0139] Cas9 endonucleases produce blunt end DNA breaks and are recruited to target DNA by a combination of a crRNA and a tracrRNA oligos, which tether the endonuclease via complementary hybridization of the RNA CRISPR complex. (see solid triangle arrows in FIG. 1A).

[0140] In some embodiments, DNA recognition by the crRNA/endonuclease complex requires additional complementary base-pairing with a protospacer adjacent motif (PAM) (e.g., 5′-NGG-3′) located in a 3′ portion of the target DNA, downstream from the target protospacer. (Jinek, M., et. al., Science. 2012:337; 816-821). In some embodiments, the PAM motif recognized by a Cas9 varies for different Cas9 proteins.

[0141] In some embodiments, one skilled in the art can appreciate that the Cas9 disclosed herein can be any variant derived or isolated from any source. For example, in some embodiments, the Cas9 peptide of the present disclosure can include one or more of SEQ ID Nos selected from SEQ ID NO: 1, SEQ ID NO: 2, SEQ ID NO: 3, SEQ ID NO: 4, SEQ ID NO: 5, and SEQ ID NO: 6. In other embodiments, the Cas9 peptide of the present disclosure can include one or more of the mutations described in the literature, including but not limited to the functional mutations described in: Fonfara et al. Nucleic Acids Res. 2014 February; 42(4):2577-90; Nishimasu H. et al. Cell. 2014 Feb. 27; 156(5):935-49; Jinek M. et al. Science. 2012 337:816-21; and Jinek M. et al. Science. 2014 Mar. 14; 343(6176); see also U.S. patent application Ser. No. 13/842,859, filed Mar. 15, 2013, which is hereby incorporated by reference; further, see U.S. Pat. Nos. 8,697,359; 8,771,945; 8,795,965; 8,865,406; 8,871,445; 8,889,356; 8,895,308; 8,906,616; 8,932,814; 8,945,839; 8,993,233; and 8,999,641, which are all hereby incorporated by reference. Thus, in some embodiments, the systems and methods disclosed herein can be used with the wild type Cas9 protein having double-stranded nuclease activity, Cas9 mutants that act as single stranded nickases, or other mutants with modified nuclease activity.

[0142] The present disclosure further envisions the use of catalytically inactivated Cas9 mutants, as described in further detail in later sections of this document. In some embodiments, the term “catalytically inactivated” or “catalytically inactive” CRISPR refers to a CRISPR protein in which the DNAase catalytic domain is non-functional (i.e., the enzyme no longer cleaves DNA). Thus in some embodiments, the present disclosure teaches dCas9 mutants. A non-limiting list of mutations that reduce or eliminate nuclease in Cas9 includes: D10, G12, G17, E762, H840, N854, N863, H982, H983, A984, D986, or A987, or a mutation in a corresponding location in a Cas9 homologue or ortholog. The mutation(s) can include substitution with any natural (e.g., alanine) or non-natural amino acid, or deletion. An exemplary nuclease defective dCas9 protein is Cas9D10A&H840A (Jinek, et al., Science. 2012 Aug. 17; 337(6096):816-21; Qi, et al., Cell. 2013 Feb. 28; 152(5):1173-83). A non-limiting list of dCas9 variants are provided in Table 1.

TABLE 1
Non-limiting list of dCas9 Vectors

| | | | Selectable | |
|---|---|---|---|---|
| Plasmid | Gene/Insert | Promoter | Marker | Publication |
| Plant | | | | |
| pYPQ153 | pco-dCas9- | | | A CRISPR/Cas9 toolbox for |
| | 3X(SRDX) | | | multiplexed plant genome |
| | (Plant codon- | | | editing and transcriptional |
| | optimized) | | | regulation. Plant Physiol. |
| | (Other) | | | 2015 Aug. 21. pii: |
| | | | | pp.00636.2015. |
| pYPQ233 (dLbCpf1- | LbCpf1- | | | A CRISPR-Cpf1 system for |
| SRDX) | SRDX (Other) | | | efficient genome editing and |
| | | | | transcriptional repression in |
| | | | | plants. Nat Plants. 2017 Feb. |
| | | | | 17; 3: 17018. doi: |
| | | | | 10.1038/nplants.2017.18. |
| pYPQ223 (dAsCpf1- | dAsCpf1- | | | A CRISPR-Cpf1 system for |
| SRDX) | SRDX (Other) | | | efficient genome editing and |
| | | | | transcriptional repression in |
| | | | | plants. Nat Plants. 2017 Feb. |
| | | | | 17; 3: 17018. doi: |
| | | | | 10.1038/nplants.2017.18. |
| pHSN6I01 | dCas9-KRAB | 2 × 35Sp, | Hygromycin | A CRISPR/Cas9 toolkit for |
| | (Synthetic), | AtU6-26p | | multiplex genome editing in |
| | gRNA | | | plants. BMC Plant Biol. |
| | scaffold | | | 2014 Nov. 29; 14(1): 327. |
| | (Synthetic) | | | |
| pMOD_A0801 | Csy4-P2A- | 35S | | A multi-purpose toolkit to |
| | AtCas9_dead | | | enable advanced genome |
| | (D10A + | | | engineering in plants. Plant |
| | H840A) | | | Cell. 2017 May 18. pii: |
| | (Synthetic) | | | tpc.00922.2016. doi: |
| | | | | 10.1105/tpc.16.00922. |
| pBUN6I11 | dCas9-KRAB | Ubi1p, | Bar | A CRISPR/Cas9 toolkit for |
| | (Synthetic), | OsU3p | | multiplex genome editing in |
| | gRNA | | | plants. BMC Plant Biol. |
| | scaffold | | | 2014 Nov. 29; 14(1): 327. |
| | (Synthetic) | | | |
| pHdzCas9-KRAB | | CaMV35S | Hygromycin | CRISPRi mediated |
| | | | | phosphoenolpyruvate |
| | | | | carboxylase regulation to |
| | | | | enhance the production of |
| | | | | lipid in Chlamydomonas |
| | | | | reinhardtii. Bioresour |
| | | | | Technol. 2017 May 4. pii: |
| | | | | S0960-8524(17)30619-3. doi: |
| | | | | 10.1016/j.biortech.2017.04.111. |
| pMOD_A0402 | AtCas9_dead | AtUbi10 | | A multi-purpose toolkit to |
| | (D10A + | | | enable advanced genome |
| | H840A) | | | engineering in plants. Plant |
| | (Synthetic) | | | Cell. 2017 May 18. pii: |
| | | | | tpc.00922.2016. doi: |
| | | | | 10.1105/tpc.16.00922. |
| pEGB 35S:dCas9:Tnos | dCas9 (Other) | 35S | | GoldenBraid 2.0: a |
| (GB1191) | | | | comprehensive DNA |
| | | | | assembly framework for |
| | | | | plant synthetic biology. Plant |
| | | | | Physiol. 2013 July; 162(3): |
| | | | | 1618-31. |
| pMOD_A1810 | Csy4-P2A- | ZmUbi | | A multi-purpose toolkit to |
| | TaCas9_dead | | | enable advanced genome |
| | (D10A + | | | engineering in plants. Plant |
| | H840A) | | | Cell. 2017 May 18. pii: |
| | (Synthetic) | | | tpc.00922.2016. doi: |
| | | | | 10.1105/tpc.16.00922. |
| Mammalian | | | | |
| pHR-SFFV-KRAB- | KRAB-dCas9- | SFFV | mCherry | Genome-Scale CRISPR- |
| dCas9-P2A-mCherry | P2A-mCherry | | | Mediated Control of Gene |
| | fusion (Homo | | | Repression and |
| | sapiens) | | | Activation. Cell. 2014 Oct. |
| | | | | 23; 159(3): 647-61. doi: |
| | | | | 10.1016/j.cell.2014.09.029. |
| | | | | Epub 2014 Oct. 9. |
| pHR-SFFV-dCas9-BFP- | dCas9-BFP- | SFFV | | CRISPR-Mediated Modular |
| KRAB | KRAB fusion | | | RNA-Guided Regulation of |
| | (Homo | | | Transcription in |
| | sapiens) | | | Eukaryotes. Cell. 2013 Jul. 9. |
| | | | | pii: S0092-8674(13)00826- |
| | | | | X. doi: |
| | | | | 10.1016/j.cell.2013.06.044. |
| pLV hU6-sgRNA hUbC- | humanized | | | Highly specific epigenome |
| dCas9-KRAB-T2a-GFP | dCas9-KRAB | | | editing by CRISPR-Cas9 |
| | T2A GFP | | | repressors for silencing of |
| | (Other), | | | distal regulatory |
| | sgRNA | | | elements.Nat Methods. 2015 |
| | | | | December; 12(12): 1143-9. doi: |
| | | | | 10.1038/nmeth.3630. Epub |
| | | | | 2015 Oct. 26. |
| pLV hU6-sgRNA hUbC- | humanized | | Puromycin | Highly specific epigenome |
| dCas9-KRAB-T2a-Puro | dCas9-KRAB | | | editing by CRISPR-Cas9 |
| | T2A Puro | | | repressors for silencing of |
| | (Other), | | | distal regulatory |
| | sgRNA | | | elements.Nat Methods. 2015 |
| | | | | December; 12(12): 1143-9. doi: |
| | | | | 10.1038/nmeth.3630. Epub |
| | | | | 2015 Oct. 26. |
| pHAGE EF1α dCas9- | dCas9 (Other) | EF1alpha | Puromycin | Cas9 effector-mediated |
| KRAB | | | | regulation of transcription |
| | | | | and differentiation in human |
| | | | | pluripotent stem |
| | | | | cells.Development. 2014 |
| | | | | January; 141(1): 219-23. doi: |
| | | | | 10.1242/dev.103341. |
| Cas9m4 | Cas9m4 | | | CAS9 transcriptional |
| | (Other) | | | activators for target |
| | | | | specificity screening and |
| | | | | paired nickases for |
| | | | | cooperative genome |
| | | | | engineering. Nat Biotechnol. |
| | | | | 2013 Aug. 1. doi: |
| | | | | 10.1038/nbt.2675. |
| pHAGE TRE dCas9- | dCas9 (Other) | TRE | Neomycin | Cas9 effector-mediated |
| KRAB | | | (select with | regulation of transcription |
| | | | G418) | and differentiation in human |
| | | | | pluripotent stem |
| | | | | cells.Development. 2014 |
| | | | | January; 141(1): 219-23. doi: |
| | | | | 10.1242/dev.103341. |
| pSLQ1658-dCas9-EGFP | dCas9 fuse to | MSCV LTR | Puromycin | Dynamic Imaging of |
| | EGFP (Homo | promoter | | Genomic Loci in Living |
| | sapiens) | | | Human Cells by an |
| | | | | Optimized CRISPR/Cas |
| | | | | System. Cell. 2013 Dec. |
| | | | | 19; 155(7): 1479-91. doi: |
| | | | | 10.1016/j.cell.2013.12.001. |
| pHR-SFFV-dCas9-BFP | dCas9-BFP | SFFV | | CRISPR-Mediated Modular |
| | fusion (Homo | | | RNA-Guided Regulation of |
| | sapiens) | | | Transcription in |
| | | | | Eukaryotes. Cell. 2013 Jul. 9. |
| | | | | pii: S0092-8674(13)00826- |
| | | | | X. doi: |
| | | | | 10.1016/j.cell.2013.06.044. |
| pLV hUbC-dCas9-T2A- | humanized | hUbC | Zeocin | Multiplex CRISPR/Cas9- |
| GFP | dead Cas9 | | | based genome engineering |
| | T2A GFP | | | from a single lentiviral |
| | (Other) | | | vector. Nucleic Acids Res. |
| | | | | 2014 Aug. 13. pii: gku749. |
| Bacteria | | | | |
| pdCas9-bacteria | dCas9 | pLtetO-1 | — | Repurposing CRISPR as an |
| | (bacteria) | | | RNA-Guided Platform for |
| | (Other) | | | Sequence-Specific Control |
| | | | | of Gene Expression. Cell. |
| | | | | 2013 Feb. 28; 152(5): 1173- |
| | | | | 83. doi: |
| | | | | 10.1016/j.cell.2013.02.022. |
| pdCas9 | tracrRNA | | — | Programmable repression |
| | (Other), dcas9 | | | and activation of bacterial |
| | (Other), | | | gene expression using an |
| | CRISPR array | | | engineered CRISPR-Cas |
| | | | | system. Nucleic Acids Res. |
| | | | | 2013 Jun. 12. |
| pMJ841 | Cas9 (Other) | T7 | — | A Programmable Dual- |
| | | | | RNA-Guided DNA |
| | | | | Endonuclease in Adaptive |
| | | | | Bacterial Immunity. Science. |
| | | | | 2012 Jun. 28. |
| pET302-6His-dCas9- | His6-dCas9- | | — | CASFISH: CRISPR/Cas9- |
| Halo | Halo | | | mediated in situ labeling of |
| | (Synthetic) | | | genomic loci in fixed |
| | | | | cells. Proc Natl Acad Sci U |
| | | | | S A. 2015 Sep. 22; 112(38): |
| | | | | 11870-5. doi: |
| | | | | 10.1073/pnas.1515692112. |
| | | | | Epub 2015 Aug. 31. |
| 10xHis-MBP-TEV-S. | dCas9 M1C | | — | Programmable RNA |
| pyogenes dCas9 M1C | D10A C80S | | | recognition and cleavage by |
| D10A C80S H840A | H840A C574S | | | CRISPR/Cas9. Nature. 2014 |
| C574S | (Other) | | | Sep. 28. doi: |
| | | | | 10.1038/nature13769. |
| pJMP1 | dCas9 (Other) | xylA | — | A Comprehensive, CRISPR- |
| | | | | based Functional Analysis of |
| | | | | Essential Genes in |
| | | | | Bacteria. Cell. 2016 Jun. |
| | | | | 2; 165(6): 1493-506. doi: |
| | | | | 10.1016/j.cell.2016.05.003. |
| | | | | Epub 2016 May 26. |
| pCRISPathBrick | | Constitutive | — | CRISPathBrick: Modular |
| | | native | | Combinatorial Assembly of |
| | | promoters | | Type II-A CRISPR Arrays |
| | | | | for dCas9-Mediated |
| | | | | Multiplex Transcriptional |
| | | | | Repression in E. coli. ACS |
| | | | | Synth Biol. 2015 Mar. 30. |
| pZ8-T_dCas9 | dcas9 | ptac | — | Corynebacterium |
| | | | | glutamicum Metabolic |
| | | | | Engineering with CRISPR |
| | | | | Interference |
| | | | | (CRISPRi). ACS Synth Biol. |
| | | | | 2016 Feb. 16. |
| DS-SPcasN- | Cas9, | proC, | — | Orthogonal Cas9 proteins for |
| | nuclease-null | tracdrRNA | | RNA-guided gene regulation |
| | (Other), | promoter | | and editing. Nat Methods. |
| | tracrRNA | | | 2013 Sep. 29. doi: |
| | precursor | | | 10.1038/nmeth.2681. |
| | (Other) | | | |
| pSET-dCas9-actII-4-NT- | dCas9 | ermE*p, | — | CRISPR/dCas9-Mediated |
| S1 | (Synthetic), | J23119 | | Multiplex Gene Repression |
| | sgRNA | | | in Streptomyces. Biotechnol |
| | | | | J. 2018 Jun. 3. doi: |
| | | | | 10.1002/biot.201800121. |
| Yeast | | | — | |
| pTDH3-dCas9-Mxi1 | dCas9-Mxi1 | TDH3 | LEU2 | CRISPR-Mediated Modular |
| | | | | RNA-Guided Regulation of |
| | | | | Transcription in |
| | | | | Eukaryotes. Cell. 2013 Jul. 9. |
| | | | | pii: S0092-8674(13)00826- |
| | | | | X. doi: |
| | | | | 10.1016/j.cell.2013.06.044. |
| pTDH3-dCas9 | dCas9 | TDH3 | LEU2 | CRISPR-Mediated Modular |
| | | | | RNA-Guided Regulation of |
| | | | | Transcription in |
| | | | | Eukaryotes. Cell. 2013 Jul. 9. |
| | | | | pii: S0092-8674(13)00826- |
| | | | | X. doi: |
| | | | | 10.1016/j.cell.2013.06.044. |
| pRS416-dCas9-Mxi1 + | dCas9-Mxi1 | pTef1, | URA3 | Quantitative CRISPR |
| TetR + pRPR1(TetO)- | (Synthetic), | pGPM1, | | interference screens in yeast |
| NotI-gRNA | Tet Repressor | pRPR1(TetO) | | identify chemical-genetic |
| | (Other), | | | interactions and new rules |
| | Structural | | | for guide RNA |
| | gRNA for S | | | design. Genome Biol. 2016 |
| | pyogenes | | | Mar. 8; 17(1): 45. doi: |
| | (Synthetic) | | | 10.1186/s13059-016-0900-9. |
| pCRISPRi_Mxi1_yl_NHEJ | Codon optimized | UAS1B8- | LEU2 | CRISPRi repression of |
| | dCas9-Mxi1 | TEF(136), | | nonhomologous end-joining |
| | (Synthetic), | SCR1′- | | for enhanced genome |
| | KU70 sgRNA | tRNA, | | engineering via homologous |
| | expression | SCR1′- | | recombination in Yarrowia |
| | cassette | tRNA, | | lipolytica.Biotechnol |
| | (Synthetic), | SCR1′- | | Bioeng. 2017 Aug. 19. doi: |
| | KU80a sgRNA | tRNA | | 10.1002/bit.26404. |
| | expression | | | |
| | cassette | | | |
| | (Synthetic), | | | |
| | KU80b sgRNA | | | |
| | expression | | | |
| | cassette | | | |
| | (Synthetic) | | | |
| pCRISPRi_Mxi1_yl | Codon | UAS1B8- | LEU2 | CRISPRi repression of |
| | optimized | TEF(136), | | nonhomologous end-joining |
| | dCas9-Mxi1 | SCR1′- | | for enhanced genome |
| | (Synthetic), | tRNA | | engineering via homologous |
| | sgRNA | | | recombination in Yarrowia |
| | expression | | | lipolytica.Biotechnol |
| | cassette | | | Bioeng. 2017 Aug. 19. doi: |
| | (Synthetic) | | | 10.1002/bit.26404. |
| pTPGI_dCas9 | Yeast- | pTPGI | TRP1 | Tunable and Multifunctional |
| | optimized | | | Eukaryotic Transcription |
| | dCas9 | | | Factors Based on |
| | (Saccharomyces | | | CRISPR/Cas.ACS Synth |
| | cerevisiae) | | | Biol. 2013 Sep. 11. |
| pJZC518 | dCas9 (Other) | pTdh3 | LEU2 | Engineering Complex |
| | | | | Synthetic Transcriptional |
| | | | | Programs with CRISPR |
| | | | | RNA Scaffolds. Cell. 2014 |
| | | | | Dec. 18. pii: S0092- |
| | | | | 8674(14)01570-0. doi: |
| | | | | 10.1016/j.cell.2014.11.052. |

[0143] CRISPR/Cpf1

[0144] In other embodiments, the present disclosure teaches methods of gene editing using a Type V CRISPR system. In some embodiments, the present disclosure teaches methods of using CRISPR from Prevotella and Francisella 1 (Cpf1).

[0145] The Cpf1 CRISPR systems of the present disclosure comprise i) a single endonuclease protein, and ii) a crRNA, wherein a portion of the 3′ end of crRNA contains the guide sequence complementary to a target nucleic acid. In this system, the Cpf1 nuclease is directly recruited to the target DNA by the crRNA (see solid triangle arrows in FIG. 1B). In some embodiments, guide sequences for Cpf1 must be at least 12 nt, 13 nt, 14 nt, 15 nt, or 16 nt in order to achieve detectable DNA cleavage, and a minimum of 14 nt, 15 nt, 16 nt, 17 nt, or 18 nt to achieve efficient DNA cleavage.

[0146] The Cpf1 systems of the present disclosure differ from Cas9 in a variety of ways. First, unlike Cas9, Cpf1 does not require a separate tracrRNA for cleavage. In some embodiments, Cpf1 crRNAs can be as short as about 42-44 bases long—of which 23-25 nt is guide sequence and 19 nt is the constitutive direct repeat sequence. In contrast, the combined Cas9 tracrRNA and crRNA synthetic sequences can be about 100 bases long. In some embodiments, the present disclosure will refer to a crRNA for Cpf1 as a “guide RNA.”

[0147] Second, Cpf1 prefers a “TTN” PAM motif that is located 5′ upstream of its target. This is in contrast to the “NGG” PAM motifs located on the 3′ of the target DNA for Cas9 systems. In some embodiments, the uracil base immediately preceding the guide sequence cannot be substituted (Zetsche, B. et al. 2015. “Cpf1 Is a Single RNA-Guided Endonuclease of a Class 2 CRISPR-Cas System” Cell 163, 759-771, which is hereby incorporated by reference in its entirety for all purposes).

[0148] Third, the cut sites for Cpf1 are staggered by about 3-5 bases, which create “sticky ends” (Kim et al., 2016. “Genome-wide analysis reveals specificities of Cpf1 endonucleases in human cells” published online Jun. 6, 2016). These sticky ends with ˜3-5 nt overhangs are thought to facilitate NHEJ-mediated-ligation, and improve gene editing of DNA fragments with matching ends. The cut sites are in the 3′ end of the target DNA, distal to the 5′ end where the PAM is. The cut positions usually follow the 18th base on the non-hybridized strand and the corresponding 23rd base on the complementary strand hybridized to the crRNA (FIG. 1B).

[0149] Fourth, in Cpf1 complexes, the “seed” region is located within the first 5 nt of the guide sequence. Cpf1 crRNA seed regions are highly sensitive to mutations, and even single base substitutions in this region can drastically reduce cleavage activity (see Zetsche B. et al. 2015 “Cpf1 Is a Single RNA-Guided Endonuclease of a Class 2 CRISPR-Cas System” Cell 163, 759-771). Critically, unlike the Cas9 CRISPR target, the cleavage sites and the seed region of Cpf1 systems do not overlap. Additional guidance on designing Cpf1 crRNA targeting oligos is available on (Zetsche B. et al. 2015. “Cpf1 Is a Single RNA-Guided Endonuclease of a Class 2 CRISPR-Cas System” Cell 163, 759-771).

[0150] Persons skilled in the art will appreciate that the Cpf1 disclosed herein can be any variant derived or isolated from any source. For example, in some embodiments, the Cpf1 peptide of the present disclosure can include one or more of SEQ ID Nos selected from SEQ ID NO: 7, 8, 9, 10, 11, 12, 13, 14, 15, 16, 17, 18, 19, 20, 21, 22, 23, 24, 25, 26, 27, 28, 29, 30, 31, 32, 33, 34, 35, 36, 37, 38, 39, 40, 41, 42, 43, 44, 45, 46, 47, 48, 49, 50, 51, 52, 53, 54, 55, 56, 57, 58, 59, 60, 61, 62, 63, 64, or any variants thereof.

[0151] The present disclosure further envisions the use of catalytically inactivated Cpf1 mutants, as described in further detail in later sections of this document. Thus in some embodiments, the present disclosure teaches dCpf1 mutants. In some embodiments, the dCpf1 of the present disclosure comprises: ddCpf1 (Zhang et al. “Multiplex gene regulation by CRISPR ddCpf1” Cell Discovery 3, Article number 17018 (2017); Francisella novicida (UniProtKB-A0Q7Q2 (CPF1_FRATN)), Lachnospiraceae bacterium (UniProtKB-A0A182DWE3 (A0A182DWE3_9FIRM)), and Acidaminococcus sp. (UniProtKB-U2UMQ6 (CPF1 ACISB). In some embodiments, the dCpf1 of the present disclosure is generated by mutating the catalytic domain AsCpf1 (D908A Yamano, T., Nishimasu, H., Zetsche, B., Hirano, H., Slaymaker, I. M., Li, Y., Fedorova, I., Nakane, T., Makarova, K. S., Koonin, E. V. et al. (2016) Crystal Structure of Cpf1 in Complex with Guide RNA and Target DNA. Cell, 165, 949-962.

[0152] Ligases

[0153] In some embodiments, the present disclosure teaches methods of cleaving target DNA via targeted Cpf1 complexes, and then ligating the resulting sticky ends with DNA inserts. In some embodiments, the present disclosure teaches methods of providing a Cpf1 complex to cleave the target DNA, and a ligase to “sew” the DNA back together. In other embodiments, the present disclosure teaches modified Cpf1 complexes that include a tethered ligase enzyme.

[0154] As used herein, the term “ligase” can comprise any number of enzymatic or non-enzymatic reagents. For example, ligase is an enzymatic ligation reagent or catalyst that, under appropriate conditions, forms phosphodiester bonds between the 3′-OH and the 5′-phosphate of adjacent nucleotides in DNA molecules, RNA molecules, or hybrids.

[0155] In some embodiments, the present disclosure teaches the use of enzymatic ligases. Compatible temperature sensitive enzymatic ligases, include, but are not limited to, bacteriophage T4 ligase and E. coli ligase. Thermostable ligases include, but are not limited to, Afu ligase, Taq ligase, Tfl ligase, Tth ligase, Tth HB8 ligase, Thermus species AK16D ligase and Pfu ligase (see for example Published P.C.T. Application WO/2000/026381, Wu et al., Gene, 76(2):245-254, (1989), and Luo et al., Nucleic Acids Research, 24(15): 3071-3078 (1996)). The skilled artisan will appreciate that any number of thermostable ligases can be obtained from thermophilic or hyperthermophilic organisms, for example, certain species of eubacteria and archaea; and that such ligases can be employed in the disclosed methods and kits. In some embodiments, reversibly inactivated enzymes (see for example U.S. Pat. No. 5,773,258) can be employed in some embodiments of the present teachings.

[0156] In other embodiments, the present disclosure teaches the use of chemical ligation agents. Chemical ligation agents include, without limitation, activating, condensing, and reducing agents, such as carbodiimide, cyanogen bromide (BrCN), N-cyanoimidazole, imidazole, 1-methylimidazole/carbodiimide/cystamine, dithiothreitol (DTT) and ultraviolet light. Autoligation, i.e., spontaneous ligation in the absence of a ligating agent, is also within the scope of the teachings herein. Detailed protocols for chemical ligation methods and descriptions of appropriate reactive groups can be found in, among other places, Xu et al., Nucleic Acid Res., 27:875-81 (1999); Gryaznov and Letsinger, Nucleic Acid Res. 21:1403-08 (1993); Gryaznov et al., Nucleic Acid Res. 22:2366-69 (1994); Kanaya and Yanagawa, Biochemistry 25:7423-30 (1986); Luebke and Dervan, Nucleic Acids Res. 20:3005-09 (1992); Sievers and von Kiedrowski, Nature 369:221-24 (1994); Liu and Taylor, Nucleic Acids Res. 26:3300-04 (1999); Wang and Kool, Nucleic Acids Res. 22:2326-33 (1994); Purmal et al., Nucleic Acids Res. 20:3713-19 (1992); Ashley and Kushlan, Biochemistry 30:2927-33 (1991); Chu and Orgel, Nucleic Acids Res. 16:3671-91 (1988); Sokolova et al., FEBS Letters 232:153-55 (1988); Naylor and Gilham, Biochemistry 5:2722-28 (1966); and U.S. Pat. No. 5,476,930.

[0157] In some embodiments, the methods, kits and compositions of the present disclosure are also compatible with photoligation reactions. Photoligation using light of an appropriate wavelength as a ligation agent is also within the scope of the teachings. In some embodiments, photoligation comprises probes comprising nucleotide analogs, including but not limited to, 4-thiothymidine, 5-vinyluracil and its derivatives, or combinations thereof. In some embodiments, the ligation agent comprises: (a) light in the UV-A range (about 320 nm to about 400 nm), the UV-B range (about 290 nm to about 320 nm), or combinations thereof, (b) light with a wavelength between about 300 nm and about 375 nm, (c) light with a wavelength of about 360 nm to about 370 nm; (d) light with a wavelength of about 364 nm to about 368 nm, or (e) light with a wavelength of about 366 nm. In some embodiments, photoligation is reversible. Descriptions of photoligation can be found in, among other places, Fujimoto et al., Nucl. Acid Symp. Ser. 42:39-40 (1999); Fujimoto et al., Nucl. Acid Res. Suppl. 1:185-86 (2001); Fujimoto et al., Nucl. Acid Suppl., 2:155-56 (2002); Liu and Taylor, Nucl. Acid Res. 26:3300-04 (1998) and on the world wide web at: sbchem.kyoto-u.ac.jp/saito-lab.

### Universal Modular CRISPR DNA Constructs and Uses Thereof

[0158] In some embodiments, the present invention describes a strategy for the modular assembly of DNA constructs. In some embodiments, the DNA assembly methods of the present disclosure are applicable to any construct, including plasmids, small linear DNA, and transformed chromosomal loci.

[0159] In aspects, the inventors refer to such a universal modular CRISPR DNA Construct as a “MegaModular” design.

[0160] Shortcomings in Traditional DNA Editing and Assembly Techniques

[0161] Traditional multicomponent DNA cloning strategies are limited in their ability to effectively assemble and modify multi-component DNA constructs with complex sequences. For example, restriction enzyme cloning is limited by the availability of unique restriction enzyme recognition sites that are appropriately located at the cloning junctures at each of the DNA inserts, and their destination sites within a final vector. Gateway cloning technologies are similarly limited by the relatively small number of unique recombination sites available for multi-component assemblies.

[0162] Another downside to traditional DNA assembly techniques is that their ability to edit sequences is often restricted to the time of construction. For example, the products of efficient assembly strategies such as Ligase Cycling Reactions (LCR are not easily modified once the initial assembly is completed (Kok, S, et al., 2014 “Rapid and Reliable DNA assembly via Ligase Cycling Reaction” ACS Synth. Biol., 3 (2): 97-106). Similar concerns arise with traditional restriction enzyme cloning, whose common restriction recognition sites cease to function as unique cloning points once a polynucleotide containing the restriction sites is inserted into the construct being assembled, or when said construct is integrated into a chromosome full of said sites. Vectors produced through sequential restriction cloning thus provide very few options for fixing or updating sequences once the cloning process is well under way.

[0163] Even newer technologies, such as the traditional CRISPR DNA assembly techniques continue to suffer from similar complexity, the ease of iterating on a previous assembled construct/vector design, and speed limitations (Wang, J W. et al., 2015 “CRISPR/Cas9 nuclease combined with Gibson assembly for seamless cloning” BioTechniques, Vol 58, No. 4:161-170). CRISPR cloning requires the design of a functional guide RNA targeted next to a compatible protospacer adjacent motif (PAM). Availability of suitable PAM sequences within target sites results in a significant design limitation to the number of possible DNA insertion locations within a genome or construct.

[0164] Moreover, the design and testing of guide RNA sequences imposes significant technical challenges for multi-component assemblies. Persons having skill in the art will recognize for example, that not all gRNA sequences are functional, and that effective implementation of a CRISPR DNA assembly may sometimes require the design and validation of multiple gRNA sequence variants. These limitations are particularly cumbersome in multi-component assemblies, where failure of a single gRNA sequence to successfully produce a desired modification can trigger the need to redesign subsequent assembly components that no longer fall within the original cloning plan. Applying techniques that require multiple custom guide RNAs for every junction of a multicomponent assembly can thus also be very expensive, cumbersome, and impractical.

[0165] Modular CRISPR Tag Assembly Vectors and Methods of Using Such

[0166] In some embodiments, the present disclosure teaches methods for DNA assembly that overcome many of the limitations associated with the aforementioned traditional techniques described above. In some embodiments, the present disclosure also teaches modular CRISPR assembly constructs, compositions, and kits for use with the methods of the present invention.

[0167] In some embodiments, the present disclosure teaches DNA constructs comprising one or more CRISPR multi-clonal sites (cMCS). In some embodiments, the cMCS of the present disclosure represent only a portion of the DNA constructs described (i.e., only a portion of the construct is readily editable according to the methods of the present disclosure). In other embodiments, the cMCS of the present disclosure are located on key positions within the entire construct, such that the entire DNA construct is readily editable. Thus, in some embodiments all the functional parts of the modular cTAG vectors (e.g., all origins, markers, cargo, elements required for assembly) are comprised within insert DNA parts and can be readily exchanged via the gene editing methods of the present disclosure.

[0168] In some embodiments, the cMCS of the present disclosure comprise one or more cloning tags (cTAG), each comprising at least one validated CRISPR targeting site. In some embodiments, the cMCS of the present disclosure further comprises DNA insert parts, each flanked by a pair of cTAGs, such that digestion of the cMCS with one or more CRISPR endonuclease targeting one or more cTAGs, will release said flanked insert part, allowing for insertion of a compatible donor DNA part.

[0169] FIGS. 2 and 3 of this specification illustrate an embodiment of a modular CRISPR assembly plasmid construct, according to the methods of the present disclosure. The disclosed example plasmid contains a series of DNA insertions (Parts 1-8 in FIG. 2A), each flanked by a pair of cTAGs (Tags A-H) in FIG. 2A. Digestion of cTAGs A and B of this example with the appropriate CRISPR/guide sequence complexes will release Part 2 of the plasmid, allowing for insertion of a replacement part 2 insert with the desired characteristics.

[0170] Persons having skill in the art will immediately recognize the advantages of the presently described vector system, which allows for the sequence-specific modular cloning/editing of vectors in vivo and in vitro. The sections below will outline the various aspects of the disclosed modular cloning vectors, as well as their various applications to molecular biology, gene therapy, and gene editing.

[0171] Modular CRISPR Vector Insert Parts

[0172] In some embodiments, the insert parts of the present disclosure are donor DNA sequences for homologous recombination insertion following a CRISPR digestion. Thus, in some embodiments, insert part sequences of the present disclosure comprise an insert sequence of interest, flanked by sequences with sufficient homology to the ends of the digested modular CRISPR construct, so as to trigger homologous recombination, hybridization and insertion of the sequence.

[0173] In other embodiments, the insert parts of the present disclosure are donor DNA sequences capable of hybridizing and ligation via sticky ends (e.g., following a Cpf1 digestion, restriction enzyme digestion, Gibson assembly, or other hybridization-based assembly, including LCR). Thus, in some embodiments, insert part sequences of the present disclosure comprise an insert sequence of interest, flanked by sequences with sufficient homology to the ends of the digested modular CRISPR construct, so as to allow for hybridization of sticky ends.

[0174] In yet other embodiments, the insert parts of the present disclosure are donor DNA sequences for blunt end ligation.

[0175] In some embodiments, the modular CRISPR DNA constructs of the present disclosure are compatible with any insert part sequence. Thus, the parts of the present vectors can comprise, without limitation, selectable markers, origins of replication, promoters, terminator sequences; other regulatory sequences, barcodes, recombination sites, or other sequences of interest to the user. In some embodiments, the insert parts of the present disclosure can comprise homology sequences for triggering homologous recombination and insertion into one or more genetic loci. In some embodiments, said homologous recombination insert parts will precede and follow other insert parts that will be also be inserted into the genome via the recombination event.

[0176] In some embodiments, the present disclosure teaches that each insert part comprises a single sequence (e.g., only a promoter or only a gene of interest, see FIG. 2A, part 8). In other embodiments, the present disclosure teaches that one or more insert parts may contain multiple elements, such as promoter-gene of interest (GOI) combinations, multi-subunit chimeric protein fusions, or even entire constructs (see FIG. 2A, part 5, comprising a promoter-GOI-terminator combination).

[0177] In some embodiments, the present disclosure teaches uncombined individual insert parts. That is, in some embodiments, the present disclosure teaches one or a plurality of unconnected insert parts (see FIG. 2A, right side showing a list of uncombined insert parts). In some embodiments, the present disclosure teaches methods of assembling said plurality of parts into one or more modular CRISPR constructs. In some aspects, the disclosure teaches kits for assembling a MegaModular construct.

[0178] In other embodiments, the present disclosure teaches partial- or fully-assembled modular CRISPR DNA constructs. For example, in some embodiments the present disclosure teaches modular CRISPR DNA constructs comprising 1, 2, 3, 4, 5, 6, 7, 8, 9, 10, 11, 12, 13, 14, 15, 16, 17, 18, 19, 20, 21, 22, 23, 24, 25, 26, 27, 28, 29, 30, 31, 32, 33, 34, 35, 36, 37, 38, 39, 40, 41, 42, 43, 44, 45, 46, 47, 48, 49, 50, 51, 52, 53, 54, 55, 56, 57, 58, 59, 60, 61, 62, 63, 64, 65, 66, 67, 68, 69, 70, 71, 72, 73, 74, 75, 76, 77, 78, 79, 80, 81, 82, 83, 84, 85, 86, 87, 88, 89, 90, 91, 92, 93, 94, 95, 96, 97, 98, 99, 100, or more assembled insert parts, and any ranges therebetween. The disclosure also teaches kits comprising said insert parts.

[0179] In some embodiments, said assembled or partially assembled modular CRISPR DNA constructs are linear. In some embodiments, said assembled or partially assembled modular CRISPR DNA constructs are circular (e.g., a plasmid). In some embodiments, said assembled or partially assembled modular CRISPR DNA constructs are integrated into genomic DNA.

[0180] In some embodiments, the constructs of the present disclosure will initially contain only short spacer sequences as placeholders for further cloning (see “stuffer” sequence in FIG. 3C). In some embodiments, the insert part placeholders are small, randomized sequences. In other embodiments, the vectors of the present disclosure will initially comprise one or more pre-selected insert DNA parts. For example, in some embodiments, the modular CRISPR constructs will initially comprise at least one selection marker, and/or at least one origin of replication.

[0181] Suitable selectable markers include, but are not limited to, genes that confer antibiotic resistance, genes that encode fluorescent proteins, tRNA genes, auxotrophic markers, toxic genes, phenotypic markers, antisense oligonucleotides, restriction endonucleases, restriction endonuclease cleavage sites, enzyme cleavage sites, protein binding sites, and sequences complementary to PCR primer sequences.

[0182] Suitable antibiotic resistance genes include, but are not limited to, a chloramphenicol resistance gene, an ampicillin resistance gene, a tetracycline resistance gene, a Zeocin resistance gene, a spectinomycin resistance gene and a kanamycin resistance gene.

[0183] In certain embodiments of the present invention, the counterselectable marker is a toxic gene. Suitable toxic genes include, but are not limited to, a ccdB gene, a gene encoding a tus protein which binds one or more ter sites, a kicB gene, a sacB gene, an ASK1 gene, a ΦX174 E gene and a DpnI gene. In some embodiments, the presence of a toxic selectable marker serves as an indicator that an insertion was not conducted, or was unsuccessful. Toxic selectable markers may also serve to decrease background of unmodified parent vectors of positive cells, by causing death to cells harboring unmodified vectors with the toxic gene still in place.

[0184] In additional embodiments of the methods of the present invention, the modular CRISPR constructs may comprise both one or more toxic genes and one or more antibiotic resistance genes.

[0185] In some embodiments, the modular CRISPR constructs will initially comprise at least one regulatory sequence. In some embodiments, the present disclosure teaches vectors comprising, without limitation, Matrix Attachment Regions, expression insulator sequences, expression enhancer sequences, promoters, 5′ UTRs, 3′ UTRs, terminator sequences, stop codons, start codons, etc. In some embodiments, the modular CRISPR constructs will initially comprise sequences for facilitating chromosomal insertion of said construct (e.g., t-DNA borders, Cre/Lox, or homology ends to chromosomal sequences). In some embodiments, the sequences for chromosomal insertion are positioned so as to insert the entire modular CRISPR construct into the genome of an organism. In other embodiments, the sequences for chromosomal insertion are positioned so as to insert only a portion of the modular CRISPR construct (see FIG. 3D).

[0186] In some embodiments, the insert parts of the present disclosure can even comprise additional cTAGs. The addition of cTAGs, through insert parts, can increase the complexity of available cloning schemes, and can also expand the size of the construct by expanding the number of available insert parts that can be replaced.

[0187] In some embodiments, the insert parts of the present disclosure can comprise a traditional cloning site. For example, in some embodiments, the present disclosure teaches insert parts comprising gateway recombination sites, restriction sites, Cre/Lox sites, or other traditional cloning sites). In some embodiments, the insert parts of the present disclosure can comprise sequences for golden gate cloning. In some embodiments, the insert parts of the present disclosure can comprise sequences for traditional restriction enzyme cloning. In other embodiments, the insert parts of the present disclosure can comprise sequences for gateway cloning.

[0188] In some embodiments, the present disclosure teaches methods of producing insert parts from traditional DNA constructs. That is, in some embodiments, the present disclosure teaches methods of adding cTAGs to traditional DNA constructs (e.g., to oligos, PCR fragments, plasmids, or other available DNA segment). In some embodiments, the present disclosure teaches methods of adding cTAGs to a single component, such as a gene of interest (GOI), promoter. In other embodiments, the present disclosure teaches methods of adding cTAGS to multi-element constructs.

[0189] In some embodiments, the present disclosure teaches the use of DNA barcodes. In some embodiments, the barcodes of the present disclosure are unique series of DNA nucleotides, that, when present in a DNA vector, can be used to look up information about the vector in a database. In some embodiments, presence of the vector can be associated in the database with a history of the vector, including the source for various components, and when the vector was produced and by whom. The barcode can also be used to distinguish otherwise identical pieces of DNA, such as when necessary for molecular counting, or other similar applications.

[0190] In some embodiments, the barcodes of the present disclosure can be associated with a whole vector. In other embodiments, the present disclosure teaches the integration of barcodes into insert parts. In some embodiments, the barcodes of the present disclosure are in one or more cTAGs. In specific embodiments, the barcode in an insert part can be used to label different CRISPR enzymes or guide RNAs encoded by the insert part. In some embodiments, sequencing the barcode can provide information that would otherwise require the sequencing of the entire insert part or entire vector/construct.

[0191] Persons having skill in the art will recognize methods for constructing insert parts. For example, in some embodiments, the cTAGs may be incorporated into a DNA molecule via PCR amplification with primers comprising said cTAGs. In other embodiments, the cTAGs may be incorporated via traditional cloning techniques (e.g., restriction enzymes, Gibson, or other assembly method). In yet other embodiments, the cTAGs can be incorporated via blunt-end ligation.

[0192] In some embodiments, the insert parts of the present disclosure can have a wide species compatibility spectrum (e.g., a marker may contain both prokaryotic and eukaryotic expression sequences to make it effective in multiple organisms). In other embodiments, the insert parts of the present disclosure are designed to have limited applicability to organisms within a single species/genus/family/order/class/phylum/kingdom or domain. In some embodiments for example, an origin of replication part may be capable of maintaining a plasmid in only a single species, or a group of species. In other embodiments, a fluorescent marker may be codon optimized to function across both prokaryotic and eukaryotic domains.

[0193] In some embodiments, Cas9 endonucleases cleave 3-4 nucleotides upstream from the PAM of a target sequence. cTAG digestion by a Cas9 complex can thus result in loss of cTAG functionality through the loss of the PAM sequence, or protospacer sequence of the target. In some embodiments, the present disclosure teaches methods of maintaining the functionality of said cTAG sequences by designing donor insert sequences such that they reconstitute the cTAG sequence upon insertion (e.g., through insertion of the previously lost PAM or protospacer sequence). Similar provisions are envisioned for sequences cleaved through Cpf1 endonucleases.

[0194] FIG. 2B illustrates the presently disclosed concept of cTAG repair. Cleavage of insert part 2 with a Cas9 endonuclease also results in loss of a portion of cTAGs A and B. Subsequent insertions of any one of insert parts 2a-2d via homologous recombination results in a restoration of the full cTAG sequence.

[0195] Persons having skill in the art will recognize the nearly infinite options for insert parts. The foregoing list of inserts was intended as illustrative, and should in no way be construed as limiting the applicability of the presently disclosed methods, kits, and constructs.

[0196] In some embodiments, the insert parts of the present disclosure can themselves encode for a CRISPR enzyme, catalytically inactivated CRISPR enzyme, or a putative CRISPR enzyme.

[0197] As used herein, the term “putative CRISPR enzyme” refers to proteins that are believed to be capable of exhibiting CRISPR-like function in vitro, or in a host cell. Persons having skill in the art will recognize the various ways in which a peptide could be categorized as a putative CRISPR enzyme. In some embodiments, a putative CRISPR enzyme will be categorized as such based on sequence or structural homology with one or more known CRISPR enzymes. In other embodiments, putative CRISPR enzymes will be categorized based on their ability to interact with one or more guide RNAs. In other embodiments, putative CRISPR enzymes will be categorized based on the results of genetic screens of gain or loss of function libraries in which the DNA encoding the enzyme is found to affect CRISPR immunity of a host cell. Thus, in some embodiments, the presently disclosed modular vectors can be used to screen putative CRISPR enzyme libraries to identify valuable enzymes with CRISPR activity in one or more host cell. In some embodiments, the present disclosure teaches high throughput methods for validating putative CRISPR enzymes by testing them in combination with one or more guide RNA sequences and measuring the degree of target cleavage. Target cleavage can be measured via any method known to persons having skill in the art, including by measuring loss of expression of a target gene, or measuring digestion by e.g., running digested products on a gel, sequencing digested products, or running PCR reactions designed to amplify only undigested target DNA.

[0198] Modular CRISPR Cloning Tags

[0199] In some embodiments, the modular CRISPR constructs of the present disclosure comprise one or more cloning tags (cTAGs). In some embodiments, the modular CRISPR constructs of the present disclosure comprise 1, 2, 3, 4, 5, 6, 7, 8, 9, 10, 11, 12, 13, 14, 15, 16, 17, 18, 19, 20, 21, 22, 23, 24, 25, 26, 27, 28, 29, 30, 31, 32, 33, 34, 35, 36, 37, 38, 39, 40, 41, 42, 43, 44, 45, 46, 47, 48, 49, 50, 51, 52, 53, 54, 55, 56, 57, 58, 59, 60, 61, 62, 63, 64, 65, 66, 67, 68, 69, 70, 71, 72, 73, 74, 75, 76, 77, 78, 79, 80, 81, 82, 83, 84, 85, 86, 87, 88, 89, 90, 91, 92, 93, 94, 95, 96, 97, 98, 99, 100 or more cTAGs.

[0200] In some embodiments, the present disclosure teaches that each cTAG comprises at least one validated CRISPR protospacer/PAM combination sequence (“CRISPR landing site”). That is, in some embodiments, cTAGs comprise at least one experimentally validated, high efficiency CRISPR landing site. In some embodiments, the cTAGs of the present disclosure may be validated by wet bench experimentation (e.g., in vitro cleavage of the cTAG sequence with a CRISPR complex targeting said CRISPR landing site). In other embodiments, the cTAG validation may be assumed from reports of cleavage in peer-reviewed journals.

[0201] In some embodiments, the cTAGs of the present disclosure comprise 1, 2, 3, 4, 5, 6, 7, 8, 9, 10, or more CRISPR landing sites. In some embodiments, the CRISPR landing sites overlap with each other. In other embodiments, the CRISPR landing sites occupy distinct non-overlapping regions within the cTAG. In some embodiments, the CRISPR landing sites can be specific for either Cas9 or Cpf1 endonuclease cleavage. In some embodiments, the CRISPR landing sites can be specific to any other current or yet to be discovered CRISPR endonuclease.

[0202] In other embodiments, the present disclosure teaches that multiple cloning sites in a single cTAG can be designed to function across different organisms. Thus in some embodiments, cTAG Cpf1 landing sites may be preferred in organisms lacking or downregulating HR machinery. In other embodiments, restriction sites of a cTAG may be preferred for initial in vitro cloning, while Cas9 or Cpf1 landing sites may be preferred for more complex editing occurring in vivo in selected eukaryotic organisms.

[0203] In some embodiments, the present disclosure teaches that cTAGs may comprise one or more non-CRISPR cloning sequences. For example, in some embodiments, the cTAGs of the present disclosure may comprise one or more elements selected from the group consisting of a restriction enzyme site, a recombination site, a topoisomerase site, a splicing site, and a Cre-Lox site.

[0204] In some embodiments, suitable restriction enzyme sites include, without limitation, sites recognized by restriction enzymes selected from the group consisting of AaII, AarI, AasI, AatII, Acc65I, AccB7I, AccI, AccIII, AciI, AclI, AcuI, AdeI, AfeI, AflII, AflIII, AgeI, AhdI, AleI, AloI, AluI, Alw21I, Alw26I, Alw44I, AlwI, AlwNI, ApaI, ApaLI, ApeKI, ApoI, AscI, AseI, AsiSI, AvaI, AvaII, AvrII, BaeI, BalI, BamHI, BanI, BanII, BbsI, BbuI, BbvCI, BbvI, BccI, BceAI, BcgI, BciVI, BclI, BcnI, BcuI, BfaI, BfiI, BfmI BfrBI, BfuAI, BfuCI, BfuI, BglI, BglII, BlpI, Bme1390I, Bme1580I, BmgBI, BmrI, BmtI, BoxI, BpiI, BplI, BpmI, Bpu10I, Bpu1102I, BpuEI, BsaAI, BsaBI, BsaHI, BsaI, BsaJI, BsaMI, BsaWI, BsaXI, BseDI, BseGI, BseJI, BseLI, BseMI, BseMII, BseNI, BseRI, BseSI, BseXI, BseYI, BsgI, Bsh1236I, Bsh1285I, BshNI, BshTI, BsiEI, BsiHKAI, BsiWI, BslI, BsmAI, BsmBI, BsmFI, BsmI, BsoBI, Bsp19I, Bsp120I, Bsp1286I, Bsp1407I, Bsp143I, Bsp143II, Bsp68I, BspCNI, BspDI, BspEI, BspHI, BspLI, BspMI, BspPI, BspQI, BspTI, BsrBI, BsrDI, BsrFI, BsrGI, BsrI, BsrSI, BssHII, BssKI, BssSI, Bst1107I, Bst98I, BstAPI, BstBI, BstEII, BstF5I, BstNI, BstOI, BstUI, BstXI, BstYI, BstZI, BstZ17I, Bsu15I, Bsu36I, BsuRI, BtgI, BtgZI, BtsCI, BtsI, BveI, Cac8I, CaiI, CfoI, Cfr10I, Cfr13I, Cfr42I, Cfr9I, CfrI, ClaI, CpoI, Csp45I, Csp6I, CspI, CspCI, CviaII, CviKI-1, CviQI, DdeI, DpnI, DpnII, Dral, DraIII, DrdI, EaeI, EagI, Eam1104I, Eam1105I, EarI, EciI, Ecl136II, EclHKI, Eco105I, Eco130I, Eco147I, Eco24I, Eco31I, Eco32I, Eco47I, Eco47III, Eco52I, Eco57I, Eco57MI, Eco72I, Eco81I, Eco88I, Eco91I, EcolCRI, EcoNI, EcoO109I, EcoP15I, EcoRI, EcoRV, EheI, Esp3I, FatI, FauI, Fnu4HI, FokI, FseI, FspI, FspAI, GsuI, HaeII, HaeIII, HgaI, HhaI, Hin1I, Hin4I, Hin6I, HincII, HindIII, HinfI, HinP1I, HpaI, HpaII, HphI, Hpy166II, Hpy188I, Hpy188III, Hpy8I, Hpy99I, HpyAV, HpyCH4III, HpyCH4IV, HpyCH4V, HpyF10VI, Hsp92I, Hsp92II, I-PpoI, I-CreI, KasI, Kpn2I, KpnI, KspAI, LweI, MbiI, MboI, MboII, MfeI, MisI, MluI, MlyI, MmeI, MnlI, Mph1103I, MscI, MseI, MslI, MspA1I, MspI, MssI, MunI, Mva1269I, MvaI, MwoI, NaeI, NarI, NciI, NcoI, NdeI, NdeII, NgoMIV, NheI, NheI-HF, NlaIII, NlaIV, NmeAIII, NmuCI, NotI, NruI, NsbI, NsiI, NspI, OliI, PacI, PaeI, PaeR7I, PagI, PauI, PciI, PdiI, PdmI, Pfl23II, PflFI, PflMI, PfoI, PhoI, PleI, PmeI, PmlI, PpiI, PpuMI, PshAI, PsiI, Psp1406I, Psp5II, PspGI, PspOMI, PspXI, PstI, PsuI, PsyI, PvuI, PvuII, PvuII-HF, RsaI, RsrII, SacI, SacII, SalI, SalI-HF, SapI, SatI, Sau3AI, Sau96I, SbfI, ScaI, ScaI-HF, SchI, ScrFI, SdaI, SduI, SexAI, SfaNI, SfcI, SfiI, SfoI, SgfI, SgrAI, SinI, SmaI, SmiI, SmlI, SmuI, SnaBI, SpeI, SphI, SphI-HF, SspI, StuI, StyD4I, StyI, SwaI, TaaI, TaiI, TaqαI, TaqI, TasI, TatI, TauI, TfiI, TliI, Tru1I, Tru91, TseI, Tsp45I, Tsp509I, TspMI, TspRI, Tth111I, TurboNaeI, TurboNarI, Van91I, VspI, XagI, XapI, XbaI, XceI, XcmI, XhoI, XhoII, XmaI, XmaJI, XmiI, XmnI, and ZraI. Aspects also include homing endonucleases such as: I-SceI, I-CeuI, and PI-PspI. The corresponding cleavage sites for these enzymes are known in the art.

[0205] In some embodiments, the present disclosure teaches the use of rare restriction enzymes, recognizing sites greater than or equal to eight nucleotides in length (≥8 restriction enzymes). In some embodiments, the present disclosure teaches use of a single rare restriction site in each cTAG. In other embodiments, the cTAGs of the present disclosure may comprise two or more restriction sites. Table 2 below provides a list of cTAGs according to the present invention, each with their rare restriction enzyme sites bolded.

TABLE 2
Example cTAG sequences, CRISPR landing sites, and rare restriction
enzyme sites (bold sequence portions are restriction sites)

| | | | |
|---|---|---|---|
| TagA | ACTGGGTGGAATCCCTTCTGCAGCACCTGGATTACCCTGTTATCCCTAGT | I-SceI | SEQ ID |
| | | | NO: 65 |
| TagB | TAATGAGTAGTCCTCATCTCCCTCAAGCAGGCGCCGGCGGTACTGCCATC | MreI | SEQ ID |
| | | | NO: 66 |
| TagC | CATATAATCTCCCTCAAGCAGGCCCCGCTGGCGCGCGCGAATGTTAGGAA | MauBI | SEQ ID |
| | | | NO: 67 |
| TagD | GCCTATAATGTGAAGAGCTTCACTGAGTAGGGCCCGGGCTGTAAACGGTT | SrfI | SEQ ID |
| | | | NO: 68 |
| TagE | ATTCGCTAGCAGATGTAGTGTTTCCACAGGGGCGATCGCTGATATGGGTC | AsiSI | SEQ ID |
| | | | NO: 69 |
| TagF | ACTACCTAGCTGCATTTTCAGGAGGAAGCGATGGGCGGCCGCACACCTTC | NotI | SEQ ID |
| | | | NO: 70 |
| TagG | TGATAATGGGTGAGTGAGTGTGTGCGTGTGGGGCGCGCCAGATGGGAACA | AscI | SEQ ID |
| | | | NO: 71 |
| TagH | ACTCCAGTCTTTCTAGAAGATGGCAAACAGCTATTATGGGTATTATGGGT | PI- | SEQ ID |
| | | PspI | NO: 72 |
| TagI | TAGTGGACGGGGCCACTAGGGACAGGATTGGCCTGCAGGATTCCCGTCAA | SbfI | SEQ ID |
| | | | NO: 73 |
| TagJ | TGAACTAAGGCGGCTGCACAACCAGTGGAG GCCTAAATGATC | none | SEQ ID |
| | | | NO: 74 |

[0206] In some embodiments, suitable recombination sites for use in the present invention include, but are not limited to: attB sites, attP sites, attL sites, attR sites, lox sites, psi sites, tnpI sites, dif sites, cer sites, frt sites, and mutants, variants and derivatives thereof. In certain embodiments of the present invention, the topoisomerase recognition site, if present, is recognized and bound by a type I topoisomerase, which may be a type IB topoisomerase. Suitable types of type IB topoisomerase include, but are not limited to, eukaryotic nuclear type I topoisomerase and poxvirus topoisomerase. In some embodiments, suitable types of poxvirus topoisomerase include, but are not limited to, poxvirus topoisomerase produced by or isolated from a virus such as vaccinia virus, Shope fibroma virus, ORF virus, fowlpox virus, molluscum contagiosum virus and Amsacta morreientomopoxvirus.

[0207] In some embodiments, cTAG arrangement of CRISPR and non-CRISPR cloning sites can be ordered according to user preference. In some embodiments, the present disclosure teaches that CRISPR binding sites should be ordered so as to be the furthest away from insert parts. In one illustrative embodiment, a cTAG could be arranged as follows from 5′-3′: (Part I)-[R1-A1-C-A2-R2]-(Part II), where R=restriction site, A=recombinase site, and C=CRISPR landing site. In some embodiments, C may include multiple overlapping, or sequential CRISPR and/or restriction landing sites. In some embodiments, the arrangement of cloning sites on a cTAG of the present disclosure will be symmetrical (i.e., provide for a symmetrical order of types of cloning sites).

[0208] In other embodiments, arrangement of cloning sites on a cTAG of the present disclosure may be non-symmetrical. For example, in another illustrative embodiment, a cTAG could be arranged as follows from 5′-3′: (Part I)-[R1-A1-C1-C2]-(Part II), where R=restriction site, A=recombinase site, and C1-2=CRISPR landing site(s). In yet other embodiments, a cTAG could be arranged as follows from 5′-3′: i) (Part I)-[R1-C1-C2]-(Part II), ii) (Part I)-[R1-C1]-(Part II), iii) (Part I)-[C1-C2]-(Part II), or their reverse order, wherein R=restriction site, A=recombinase site, and C1-2=CRISPR landing site(s).

[0209] Persons having skill in the art will recognize the advantages and applications of various cTAG arrangements. For example, in single-tag embodiments, the modular construct would allow for insertion with the digestion of a single CRISPR endonuclease, but would not (without more, for example further digestion of additional cTAGs) allow for removal or replacement of said insertion, due to the lack of a second flanking cTAG site. In some embodiments, the present disclosure teaches that inserted parts may themselves contain additional cTAGs, to expand the number of possible insert part locations within the cMCS.

[0210] In other embodiments, the present disclosure teaches methods of removing one or more insert parts from the modular CRISPR constructs. In some embodiments, two or more of the cTAGs of a modular CRISPR construct comprise restriction enzyme binding sites capable of creating compatible ends. In some embodiments, the restriction enzyme sites are identical. In other embodiments, the restriction enzyme sites are distinct, but the resulting digestion of said sites produces compatible ends for hybridization and ligation. In some embodiments, the restriction sites for deletion of portions of a modular CRISPR construct are placed on other ends of two or more cTAGS, such that the resulting ligated construct will still maintain the same ratio of insert parts to cTAGS.

[0211] In some embodiments, the present disclosure teaches that the restriction enzyme sites used for deletions within the modular CRISPR constructs of the present disclosure can be any restriction enzyme that results in compatible ends. In other embodiments, the present disclosure teaches that the restriction enzyme sites used for deletions within the modular CRISPR constructs of the present disclosure can be any rare 8≥base restriction enzyme that result in compatible ends. In selected embodiments, the present disclosure teaches that the restriction enzyme sites used for deletions within the modular CRISPR constructs of the present disclosure can be I-SceI and PI-PspI.

[0212] In some embodiments, the present disclosure teaches modular CRISPR constructs with two cTAGs flanking each insert part, so as to create a cTAG pair. In some embodiments, the aforementioned cTAG pairs allow for the selective cutting/replacement of insert parts. For example, as illustrated in FIG. 2B, digestion of the modular CRISPR plasmid with endonucleases targeting cTAGs A and B would result in the specific removal of insert part 2.

[0213] As discussed above, selected embodiments of the present disclosure provide for replacement insert parts that restore cTAG function following endonuclease cleavage. Thus, as illustrated in FIG. 2B, replacement insert parts 2a-2d comprise sequences that will restore cTAG A and B function upon insertion into the modular CRISPR plasmid.

[0214] In some embodiments, the present disclosure teaches that cTAGs can also control insert part directionality. Sequence homology between cTAG ends in insert parts and cleaved cTAGs in the modular CRISPR construct will determine insertion directionality for Cas9 cleaved sequences, either through homologous recombination or hybridization (e.g., in Gibson approaches). Insertion directionality in Cpf1 sequences may also be controlled via Watson crick hybridization of Cpf1 sticky ends on either cTAG.

[0215] In some embodiments, the present disclosure also provides for alternative cTAG arrangements. For example, in some embodiments, the modular CRISPR constructs of the present disclosure may be designed such as to provide functionality for the use of nested cTAGs.

[0216] In some embodiments, the present disclosure teaches component-based CRISPR assemblies based on shared overlapping “tag” regions that enable multicomponent assembly in vitro and in vivo. In some embodiments, the tags of the present disclosure comprise CRISPR landing sites to facilitate future cloning or in vitro DNA assembly from DNA constructs. If DNA constructs are integrated into the genome of a host organism, preselected Cas9 or Cpf1 landing sites may facilitate facile genetic alterations. In a single suite of experiments, the assembly strategy enables construction of DNA plasmids that can be used in multiple organisms, containing multiple numbers and types of DNA components.

[0217] In some embodiments, this assembly strategy can be used to assemble and quickly reassemble plasmids encoding any desired set of DNA components, including metabolic pathways. In other embodiments, designing cTAGs into integrating plasmids can also be used to swap DNA components directly in and out of the genome of host organisms, circumventing the need to clone future plasmids.

[0218] cTAG Sequence Design Algorithm

[0219] In some embodiments, the present disclosure teaches algorithms designed to facilitate CRISPR landing sites within cTAGs. In some embodiments, the CRISPR landing sites are sequences identified from existing sequences. Thus, in some embodiments, the present disclosure teaches use of software programs is designed to identify candidate CRISPR target sequences on both strands of an input DNA sequence based on desired guide sequence length and a CRISPR motif sequence (PAM, protospacer adjacent motif) for a specified CRISPR enzyme. For example, target sites for Cpf1 from Francisella novicida U112, with PAM sequences TTN, may be identified by searching for 5′-TTN-3′ both on the input sequence and on the reverse-complement of the input. The target sites for Cpf1 from Lachnospiraceae bacterium and Acidaminococcus sp., with PAM sequences TTTN, may be identified by searching for 5′-TTTN-3′ both on the input sequence and on the reverse complement of the input. Likewise, target sites for Cas9 of S. thermophilus CRISPR1, with PAM sequence NNAGAAW, may be identified by searching for 5′-Nx-NNAGAAW-3′ both on the input sequence and on the reverse-complement of the input. The PAM sequence for Cas9 of S. pyogenes is 5′-NGG-3′.

[0220] Likewise, target sites for Cas9 of S. thermophilus CRISPR, with PAM sequence NGGNG, may be identified by searching for 5′-N, -NGGNG-3′ both on the input sequence and on the reverse-complement of the input.

[0221] In other embodiments, the present disclosure teaches methods of designing CRISPR landing sites from scratch. Persons having skill in the art will readily be able to design CRISPR landing sites in conjunction with the guide RNAs of the present disclosure, wherein the resulting protospacer sequence is combined with the PAM motif appropriate to the desired CRISPR endonuclease, as described above.

[0222] In some embodiments, the present disclosure teaches cTAGs comprising a sequence selected from the group consisting of: SEQ ID NO. 65, 66, 67, 68, 69, 70, 71, 72, 73, 74, 78, 79, 80, 81, and combinations thereof.

[0223] Since multiple occurrences in the genome of the DNA target site may lead to nonspecific genome editing, after identifying all potential sites, the present disclosure teaches, in some embodiments, filtering out sequences based on the number of times they appear in the relevant reference genome or modular CRISPR construct. For those CRISPR enzymes for which sequence specificity is determined by a ‘seed’ sequence (such as the first 5 nt of the guide sequence for Cpf1-mediated cleavage) the filtering step may also filter out different sequences with the same seed.

[0224] In some embodiments, algorithmic tools can also identify potential off target sites for a particular guide sequence. For example, in some embodiments Cas-Offinder can be used to identify potential off target sites for Cpf1 (see Kim et al., 2016. “Genome-wide analysis reveals specificities of Cpf1 endonucleases in human cells” published online Jun. 6, 2016). Any other publicly available CRISPR design/identification tool may also be used, including for example the Zhang lab's crispr.mit.edu tool (see Hsu, et al. 2013 “DNA targeting specificity of RNA_guided Cas9 nucleases” Nature Biotech 31, 827-832).

[0225] In some embodiments, the user may be allowed to choose the length of the seed sequence. The user may also be allowed to specify the number of occurrences of the seed:PAM sequence in a genome for purposes of passing the filter. The default is to screen for unique sequences. Filtration level is altered by changing both the length of the seed sequence and the number of occurrences of the sequence in the genome. The program may, in addition, or alternatively, provide the sequence of a guide sequence complementary to the reported target sequence(s) by providing the reverse complement of the identified target sequence(s).

### Modular CRISPR DNA Construct Cloning

[0226] In some embodiments, the present disclosure teaches methods for preparing new recombinant nucleic acid molecules using the modular CRISPR DNA constructs of the present disclosure. In some embodiments, the present disclosure teaches methods of DNA part assembly. Descriptions of each method are provided below.

[0227] DNA Assembly Methods

[0228] In some embodiments, the present disclosure teaches methods for the modular assembly of DNA parts. In some embodiments, the DNA assembly methods of the present disclosure are conducted in vitro. Thus, in some embodiments, the present disclosure teaches the steps of i) forming a mixture comprising at least two insert part DNAs together with at least one CRISPR complex, and ii) allowing said mixture to incubate in conditions for CRISPR digestion of the insert DNAs, iii) followed by hybridizing the compatible sticky ends from the digestion of each of the two insert part DNAs, and iv) ligating said hybridized ends to one another to create the new recombinant nucleic acid. Thus, in some embodiments, the insert part DNAs of the present disclosure are digested together. In other embodiments, the present disclosure teaches methods of digesting each insert part DNA individually, with the same or different CRISPR complexes. In some embodiments, at least one insert part is not digested by a CRISPR complex. In some embodiments, the present disclosure teaches that an exonuclease treatment is conducted prior to the hybridization of step iii) (for dual CRISPR digestions as described in later sections).

[0229] In yet other embodiments, the present disclosure teaches Gibson-like joining of insert parts, by exposing the insert part ends to an ssDNA exonuclease, and hybridizing the resulting sticky ends followed by an optional fill with polymerase, and ligation. In some embodiments, one or more insert parts are exposed to a dsDNA exonuclease prior to the ssDNA exonuclease treatment. In some embodiments, the present disclosure teaches Gibson-like joining of insert parts or modular CRISPR vectors that have been digested by one or more CRISPR endonuclease (e.g., dual CRISPR digestions, as described in later sections).

[0230] The sections below provide a series of illustrative examples demonstrating the various ways in which the insert parts and modular CRISPR constructs of the present disclosure can be assembled and edited. The list of techniques described below provides an illustrative series of examples highlighting the utility of the sequences of the present disclosure, but is not intended to be limiting. Persons having skill in the art will recognize other techniques that allow for the assembly and editing of insert parts according to the present disclosure.

[0231] In some embodiments, the present disclosure describes methods involving Cpf1 and/or Cas9 CRISPR endonucleases. Reference to these specific CRISPR endonucleases is illustrative, and is not intended to be limiting, unless specified in a claim. Persons having skill in the art will immediately recognize the applicability of other existing—or heretofore undiscovered CRISPR endonucleases to the constructs and methods of the present disclosure. References to Cpf1 may be interpreted as encompassing use of any presently known or undiscovered CRISPR endonuclease capable of catalyzing staggered DNA cleavage to produce sticky DNA ends. References to Cas9 may similarly be interpreted as encompassing use of any presently known or undiscovered CRISPR endonuclease capable of catalyzing blunt end cleavage of dsDNA.

[0232] In Vitro Cpf1

[0233] In some embodiments, the in vitro DNA assemblies of the present disclosure are conducted with Cpf1 CRISPR complexes as described below. First, two or more insert parts are incubated with a Cpf1 CRISPR complex targeting the cTAG that is common between the at least two insert parts. In some embodiments, the insert parts are incubated together in a single mixture. In other embodiments, the insert parts are incubated in different mixtures.

[0234] Second, in some embodiments, the digested products are purified to remove active CRISPR nuclease. In some embodiments, the purification involves separation of the active Cpf1 complex from the digested insert parts. In some embodiments, this can be accomplished through a DNA purification, such as a gel or column purification. In other embodiments, the purification can be accomplished by Cpf1 inactivation, such as through heat or chemical inactivation.

[0235] Third, the digested insert parts are incubated in conditions appropriate for hybridization of the compatible sticky ends created by the Cpf1 complex. Hybridized ends are then ligated according to any known ligation methods, including those described in earlier portions of this disclosure.

[0236] In some embodiments the present disclosure teaches DNA assemblies using a CRISPR and Ligase Cloning method (termed “CLIC”) (see U.S. Ser. No. 16/310,895; WO/2018/013990, both of which are hereby incorporated in their entireties).

[0237] In the CLIC technique, crRNA targeting polynucleotides are designed to bind in inverse orientation to the inner portion of a DNA insert region slated for deletion (e.g., a Multi Clonal Site “MCS”) so as to cleave towards the outside of the removed DNA fragment. Separate crRNA targeting polynucleotides are also designed to target the outer ends of DNA inserts (e.g., a gene of interest “GOI”), so as to remove the DNA binding sites during the reaction. In some embodiments, the crRNA guide sequences can be the same.

[0238] Designing the crRNA binding sites in inverse orientation, ensures that the sites are removed in the cleavage process, allowing two DNA fragments flanked by compatible sequence overhangs to be ligated seamlessly in the same reaction.

[0239] In Vitro Cas9

[0240] In other embodiments, the in vitro DNA assemblies of the present disclosure are conducted with Cas9 CRISPR complexes as described below. First, two or more insert parts are incubated with a Cas9 CRISPR complex targeting the cTAG that is common between the at least two insert parts. In some embodiments, the insert parts are incubated together in a single mixture. In other embodiments, the insert parts are incubated in different mixtures.

[0241] Second, in some embodiments, the digested products are purified to remove active CRISPR nuclease. In some embodiments, the purification involves separation of the active Cas9 complex from the digested insert parts. In some embodiments, this can be accomplished through a DNA purification, such as a gel or column purification. In other embodiments, the purification can be accomplished by Cas9 inactivation, such as through heat or chemical inactivation.

[0242] In some embodiments, the third step for Cas9 digested products is to incubate the insert parts in conditions appropriate for blunt end-ligation.

[0243] Dual CRISPR Assemblies

[0244] In other embodiments, the present disclosure also teaches Gibson-assembly type methods for assembling the pieces of CRISPR-digested insert parts with at least one shared cTAG sequence (e.g., assembly of compatible cTAGs digested at different CRISPR landing sites). Thus, in some embodiments, the present disclosure teaches dual CRISPR digestion assemblies as described below.

[0245] First, two or more insert parts are incubated with two CRISPR complexes targeting two different CRISPR landing sites flanking each part within the aforementioned cTAGs that are common between the at least two insert parts.

[0246] In some embodiments, the two different CRISPR landing sites are digested together. In other embodiments, one insert part DNA is digested with one CRISPR complex targeting one CRISPR landing site, and the other insert part DNA is digested with a different CRISPR complex targeting the second CRISPR landing target site in separate vessels. In each case, the result of these digestions will be that the shared cTAG in each of the two insert DNA cTAGs will comprise at least 1, 2, 3, 4, 5, 6, 7, 8, 9, 10, 11, 12, 13, 14, 15, 16, 17, 18, 19, or 20 bp of sequence overlap with each other.

[0247] For example, in an illustrative embodiment, the shared cTAG between two insert DNA parts would be arranged as follows from 5′-3′: (Part I)-[R1-C1-C2]-(Part II), where R=restriction site, C1=a first CRISPR landing site and C2=a second CRISPR landing site. In this illustrative embodiment, the first insert DNA part with a 3′ shared cTAG would be digested with a CRISPR complex targeting C2 and the second insert DNA part with a 5′ shared cTAG would be digested with a CRISPR complex targeting C1. This would result in two DNA insert parts with overlapping sequence spanning C1-C2.

[0248] Second, in some embodiments, the digested products are purified to remove active CRISPR nuclease. In some embodiments, the purification involves separation of the active CRISPR complex from the digested insert parts. In some embodiments, this can be accomplished through a DNA purification, such as a gel or column purification. In other embodiments, the purification can be accomplished by CRISPR inactivation, such as through heat or chemical inactivation.

[0249] Third, in some embodiments, the CRISPR-digested insert parts are incubated with a ssDNA exonuclease to create overlapping sticky ends between the two insert DNA parts.

[0250] Fourth, the digested insert parts are incubated in conditions appropriate for hybridization of the compatible sticky ends created by the CRISPR complex/exonuclease digestions. Hybridized ends are then ligated according to any known ligation methods, including those described in earlier portions of this disclosure. In some embodiments, the hybridized parts are incubated with a polymerase to fill in any missing sequence gaps prior to ligation.

[0251] Bridging Assemblies

[0252] In other embodiments, the present disclosure teaches Gibson-assembly of Cas9 digested parts, through the addition of a third DNA sequence comprising a bridging sequence that overlaps with the digested cTAG sequences of the insert parts.

[0253] In this illustrative example, both insert parts are digested with the same Cas9 CRISPR complex targeting the same CRISPR landing site. In this embodiment, the resulting digested cTAGs would have no sequence overlap. Thus, in some embodiments, the third step is for Cas9 digested insert parts to be further digested with an ssDNA exonuclease to create either 3′ or 5′ overhang. The exonuclease digested insert parts are then incubated in conditions appropriate for hybridization of the compatible sticky ends created by the combination of the CRISPR complex and exonuclease digestions with the bridging sequence. Hybridized ends are then ligated according to any known ligation methods, including those described in earlier portions of this disclosure. In some embodiments, the exonuclease digestion of the present disclosure is conducted before the second step.

[0254] In Vitro HDR

[0255] In other embodiments, the present disclosure teaches in vitro methods of assembling the ends of insert part DNAs digested by a Cas9 or Cpf1 endonuclease with an HDR complex, thereby triggering recombination of said digested insert parts.

[0256] In Vivo Homologous Recombination

[0257] In some embodiments, the in vivo DNA assemblies of the present disclosure are conducted with Cpf1 or Cas9 CRISPR complexes as described below. In one embodiment, two or more insert parts with at least one shared cTAG are introduced into a host cell. In some embodiments, the presence of DNA insert parts with homologous shared cTAG sequences will be sufficient to trigger homologous recombination assembly (e.g., yeast homologous recombination).

[0258] For example, in some embodiments, at least one shared cTAG sequence between the two insert DNA parts could be assembled to produce a linear construct. In this illustrative embodiment, the two remaining outer cTAGs could also be designed to recombine with cTAGs of another vector within the cell (e.g., insertion into an existing plasmid, or a chromosome). In other embodiments, the two parts could be further assembled into a circular construct through the recombination of a second shared cTAG between the two insert DNA parts. The assembled construct can be either used in the organism that was used for the assembly, or can, in some embodiments, be purified and transformed into a second organism (e.g., assembly in yeast, and subsequent transformation into bacteria).

[0259] In other embodiments, one or more insert parts with a shared cTAG can be digested prior to introduction into the host cell. Thus, in some embodiments, the present disclosure teaches CRISPR digestions to release insert parts from larger vectors prior to in vivo assembly of the released parts. In some embodiments, the digestion is carried out with Cas9. In other embodiments, the digestion is carried out with Cpf1. In other embodiments, the digestion is carried out with restriction endonucleases. In some embodiments, the CRISPR digestions of insert parts are conducted in vitro. In some embodiments, the digested products are purified to remove active CRISPR endonuclease prior to transformation of the insert parts into the assembly host cell.

[0260] In some embodiments, the purification step can be accomplished through a DNA purification, such as a gel or column purification. In other embodiments, the purification can be accomplished by CRISPR inactivation, such as through heat or chemical inactivation.

[0261] In Vivo Ligation

[0262] In some embodiments, the present disclosure teaches methods of protecting insert parts from re-cleavage by the CRISPR endonuclease. In some embodiments, the insert parts of the present disclosure may be protected from endonuclease cleavage via chemical modification of the DNA sequence. For example, in some embodiments, the present disclosure teaches phosphorothioate oligonucleotides.

[0263] In some embodiments, the methods of the present disclosure are especially useful for multi-part DNA assemblies.

[0264] FIG. 2A of the specification provides an illustrative example of a multi-part DNA assembly, according to the methods of the present disclosure. In this example, a series of eight DNA parts (parts 1-8), each with two cTAGs (tags A-H) are combined in vitro and are then able to self-assemble (either via homologous recombination in vivo, or via ligation, as described above).

### DNA Editing Methods

[0265] In some embodiments, the present disclosure teaches methods for the editing of modular CRISPR DNA constructs. In some embodiments, the DNA editing methods of the present disclosure apply the same principles of the DNA assembly methods described above, but do so for the purposes of editing one or more pre-existing modular CRISPR DNA constructs.

[0266] In some embodiments, the DNA editing methods of the present disclosure are conducted in vitro. Thus, in some embodiments, the present disclosure teaches the steps of i) forming a mixture comprising a modular CRISPR DNA construct, and at least one insert DNA part, together with at least one CRISPR complex, and ii) allowing said mixture to incubate in conditions for CRISPR digestion of the cTAGS of the insert DNA, and its corresponding modular CRISPR DNA construct cTAGs, followed by iii) hybridizing the compatible sticky ends (if Cpf1) produced by the digestion of each of the aforementioned cTAGs, and iv) ligating said hybridized ends (or blunt ends, if Cas9 is used) to one another to create the new recombinant nucleic acid. In some embodiments, an exonuclease treatment is conducted prior to the hybridization of step iii) (for dual CRISPR digestions as described in later sections). In some embodiments, the digestions of the present disclosure are conducted separately for the insert part DNA and modular CRISPR DNA construct. In some embodiments, only the modular CRISPR DNA construct is digested with a CRISPR complex.

[0267] In Vitro Cpf1

[0268] In some embodiments, the in vitro DNA editing methods of the present disclosure are conducted with Cpf1 CRISPR complexes as described below. First, a modular CRISPR DNA construct, and at least one insert DNA part are incubated with a Cpf1 CRISPR complex targeting the cTAGs of the insert parts, and their corresponding tags within the modular CRISPR DNA construct. In some embodiments, the digestion of the modular CRISPR DNA and the insert part DNA is conducted in separate reactions.

[0269] Second, in some embodiments, the digested products are purified to remove active CRISPR nuclease. In some embodiments, the purification involves separation of the active Cpf1 complex from the digested nucleotides. In some embodiments, this can be accomplished through a DNA purification, such as a gel or column purification. In other embodiments, the purification can be accomplished by Cpf1 inactivation, such as through heat or chemical inactivation.

[0270] Third, the digested modular CRISPR DNA construct and insert parts are incubated in conditions appropriate for hybridization of the compatible sticky ends created by the Cpf1 complex. Hybridized ends are then ligated according to any known ligation methods, including those described in earlier portions of this disclosure.

[0271] In Vitro Cas9

[0272] In other embodiments, the in vitro DNA editing methods of the present disclosure are conducted with Cas9 CRISPR complexes as described below. First, a modular CRISPR DNA construct, and at least one insert DNA part are incubated with a Cas9 CRISPR complex targeting the cTAGs of the insert parts, and their corresponding tags within the modular CRISPR DNA construct. In some embodiments, the digestion of the modular CRISPR DNA and the insert part DNA are conducted in separate reactions.

[0273] Second, in some embodiments, the digested products are purified to remove active CRISPR nuclease. In some embodiments, the purification involves separation of the active Cas9 complex from the digested nucleotides. In some embodiments, this can be accomplished through a DNA purification, such as a gel or column purification. In other embodiments, the purification can be accomplished by Cas9 inactivation, such as through heat or chemical inactivation.

[0274] In some embodiments, the third step for Cas9 digested products is to incubate the insert parts in conditions appropriate for blunt end-ligation.

[0275] Gibson Editing

[0276] In other embodiments, the present disclosure also teaches Gibson-assembly type methods for editing the sequences of CRISPR-digested constructs and/or undigested insert parts containing intact overlapping cTAG sequence. Thus, in some embodiments, the third step is for Cas9 digested modular CRISPR DNA construct and insert part(s) to be further digested with an ssDNA exonuclease to create either a 3′ or 5′ overhang. In some embodiments, the present disclosure teaches dsDNA exonuclease digestion to shorten the non-CRISPR digested insert parts prior to the ssDNA digestion.

[0277] The exonuclease digested DNA sections are then incubated under conditions appropriate for hybridization of the compatible sticky ends created by the combination of the CRISPR complex and exonuclease digestions. Hybridized ends are then ligated according to any known ligation methods, including those described in earlier portions of this disclosure. In some embodiments, the hybridized DNA is incubated with a polymerase to fill in missing DNA sections prior to ligation. In some embodiments, the exonuclease digestion of the present disclosure is conducted before the CRISPR inactivation step.

[0278] In some embodiments, the ligation of digested sequences can occur in vitro.

[0279] In other embodiments, the present disclosure teaches in vitro methods of assembling the ends of a modular CRISPR DNA construct digested by a Cas9 or Cpf1 endonuclease, and at least one undigested insert with an HDR complex, thereby triggering recombination of said digested modular CRISPR DNA construct, and at least one insert DNA part.

[0280] In some embodiments of the DNA editing methods of the present disclosure, the DNA insert parts are comprised within a second modular CRISPR DNA construct. Thus, in some embodiments, the DNA editing methods of the present disclosure comprise the transfer of a DNA insert part from one modular CRISPR DNA construct to another.

### Use of Modular CRISPR DNA Constructs to Modulate CRISPR Activity in a Host Cell

[0281] In some embodiments, the present disclosure teaches compositions and methods for modulating CRISPR activity in a cell. Thus, in some embodiments, the present disclosure teaches recombinant modular CRISPR DNA constructs, wherein said constructs comprise a nucleic acid for one or more modulator of CRISPR function.

[0282] As used herein, the term “modulator of CRISPR function” should be broadly construed to refer to any sequence, than when present in an extra chromosomal vector, or when integrated into the genome of a host cell, results in a modification (e.g., increase or decrease) of CRISPR activity in the host cell. In some embodiments, the present disclosure teaches that the modulator of CRISPR function is selected from the group consisting of: an origin of replication, a selectable marker, an anti-CRISPR protein, a promoter, a terminator, a dCas protein, a dCpf1 protein, a barcode, a Cas9 protein, a Cpf1 protein, a DNA donor, and a protein that facilitates multiplexing.

[0283] In specific embodiments, the modulators of CRISPR function are anti-CRISPR proteins (Pawluk et al., “Anti-CRISPR: discovery, mechanisms and function” Nature Reviews: Microbiology Vol 16, January 2018, pp 12-16). CRISPR-Cas adaptive immune systems are widespread among bacteria and archaea. Recent studies however, have shown that CRISPR systems have minimal long-term evolutionary effects on bacterial immunity, suggesting the presence of anti-CRISPR factors that assist phages and other mobile genetic elements in evading CRISPR-Cas immunity.

[0284] To date, there have been 21 unique families of anti-CRISPR proteins described against type I and type II CRISPR-Cas systems. Over the past few years, mechanisms of action have been determined for several anti-CRISPR proteins by use of a combination of genetic, biochemical and structural studies. Some anti-CRISPR proteins negative regulate CRISPR enzyme function by interfering with DNA binding. Other anti-CRISPR proteins trigger dimerization of CRISPR enzymes, thus reducing availability for gene editing. Yet other anti-CRISPR proteins block the endonuclease activity of CRISPR enzymes, thus reducing their ability to make double stranded DNA breaks. In some embodiments, the present disclosure teaches use of anti-CRISPR proteins to modulate the activity of host CRISPR activity, either by affecting native CRISPR systems, or by further modifying the effect of exogenously added CRISPR complexes.

[0285] In some embodiments, the modulators of CRISPR function are used to “fine tune” CRISPR activity in a host cell. In other embodiments, the modulators of CRISPR function are used to reduce CRISPR activity in a host cell. In other embodiments, the modulators of CRISPR function are used to increase CRISPR activity in a host cell.

[0286] In one illustrative example, the present disclosure teaches the use of anti-CRISPR enzymes for improving the transformation rates of host cells. In some species, CRISPR represents a barrier to transformation. The present disclosure teaches that eliminating CRISPR-based innate immunity through the use of anti-CRISPR proteins can make some microbial species amenable to genetic manipulation. A recent report described various anti-CRISPR proteins derived from phage (Bondy-Denomy et al, 2013 Nature 493:429-432). Using anti-CRISPR proteins to overcome barriers to transformation has a number of advantages: First, the presence of a CRISPR system in the host organism can be easily determined by genomic DNA sequence analysis. Second, co-expression of anti-CRISPR requires no a priori manipulation of the host genome. Third, inducible expression of anti-CRISPR proteins allows for negative selection of plasmids (i.e. plasmids are destroyed in a CRISPR-dependent fashion when anti-CRISPR protein expression is shut off).

[0287] In one embodiment, a plasmid encoding one or more anti-CRISPR proteins along with an antibiotic resistance gene and gene(s) of interest are transformed into a new host and transformants are selected based on antibiotic resistance. The presence of antibiotic resistant clones and the loss of antibiotic resistance when anti-CRISPR gene expression is turned off are phenotypes that indicate the barrier to transformation has been effectively eliminated. In a second embodiment, anti-CRISPR protein is co-transformed with said plasmid in order to ensure the plasmid is not restricted by an active CRISPR system before gene expression is established. A non-limiting list of anti-CRISPR proteins compatible with the compositions and methods of the present disclosure is provided in Table 3.

TABLE 3
Non-limiting list of anti-CRISPR proteins of the present disclosure

| Anti-CRISPR | | CRISPR system | Number of | |
|---|---|---|---|---|
| protein Family | Characterized member | inhibited | amino acids | Reference disclosing same |
| AcrE1 | JBD5-34 (Pseudomonos | I-E | 100 | Maxwell, K. L. & |
| | oeruginoso) | | | Davidson, A. R. A new |
| | | | | group of phage anti- |
| | | | | CRISPR genes inhibits the |
| | | | | type I-E CRISPR-Cas |
| | | | | system of Pseudomonas |
| | | | | aeruginosa. mBio 5, |
| | | | | e00896 (2014). |
| AcrE2 | J BD88a-3 2 (P. aeruginosa) | I-E | 84 | Maxwell, K. L. & |
| | | | | Davidson, A. R. A new |
| | | | | group of phage anti- |
| | | | | CRISPR genes inhibits the |
| | | | | type I-E CRISPR-Cas |
| | | | | system of Pseudomonas |
| | | | | aeruginosa. mBio 5, |
| | | | | e00896 (2014). |
| AcrE3 | DMS3-30 (P. aeruginosa) | I-E | 68 | Maxwell, K. L. & |
| | | | | Davidson, A. R. A new |
| | | | | group of phage anti- |
| | | | | CRISPR genes inhibits the |
| | | | | type I-E CRISPR-Cas |
| | | | | system of Pseudomonas |
| | | | | aeruginosa. mBio 5, |
| | | | | e00896 (2014). |
| AcrE4 | D3112-31 (P. aeruginosa) | I-E | 52 | Maxwell, K. L. & |
| | | | | Davidson, A. R. A new |
| | | | | group of phage anti- |
| | | | | CRISPR genes inhibits the |
| | | | | type I-E CRISPR-Cas |
| | | | | system of Pseudomonas |
| | | | | aeruginosa. mBio 5, |
| | | | | e00896 (2014). |
| AcrF1 | JBD30-35 (P. aeruginosa) | I-F | 78 | Bondy-Denomy, J., |
| | | | | Pawluk, A., Maxwell, K. L. |
| | | | | & Davidson, A. R. |
| | | | | Bacteriophage genes that |
| | | | | inactivate the CRISPR/Cas |
| | | | | bacterial immune system. |
| | | | | Nature 493, 429-432 |
| | | | | (2013). |
| AcrF2 | D3112-30 (P. aeruginosa) | I-F | 90 | Bondy-Denomy, J., |
| | | | | Pawluk, A., Maxwell, K. L. |
| | | | | & Davidson, A. R. |
| | | | | Bacteriophage genes that |
| | | | | inactivate the CRISPR/Cas |
| | | | | bacterial immune system. |
| | | | | Nature 493, 429-432 |
| | | | | (2013). |
| AcrF3 | JBD5-35 (P. aeruginosa) | I-F | 139 | Bondy-Denomy, J., |
| | | | | Pawluk, A., Maxwell, K. L. |
| | | | | & Davidson, A. R. |
| | | | | Bacteriophage genes that |
| | | | | inactivate the CRISPR/Cas |
| | | | | bacterial immune system. |
| | | | | Nature 493, 429-432 |
| | | | | (2013). |
| AcrF4 | JBD26-3 7 (P. aeruginosa) | I-F | 100 | Bondy-Denomy, J., |
| | | | | Pawluk, A., Maxwell, K. L. |
| | | | | & Davidson, A. R. |
| | | | | Bacteriophage genes that |
| | | | | inactivate the CRISPR/Cas |
| | | | | bacterial immune system. |
| | | | | Nature 493, 429-432 |
| | | | | (2013). |
| AcrF5 | JBD5-36 (P. aeruginosa) | I-F | 79 | Bondy-Denomy, J., |
| | | | | Pawluk, A., Maxwell, K. L. |
| | | | | & Davidson, A. R. |
| | | | | Bacteriophage genes that |
| | | | | inactivate the CRISPR/Cas |
| | | | | bacterial immune system. |
| | | | | Nature 493, 429-432 |
| | | | | (2013). |
| AcrF6 | AcrF6_{Poe} (P. aeruginosa) | I-E and I-F | 100 | Pawluk, A. et al. |
| | | | | Inactivation of CRISPR- |
| | | | | Cas systems by anti- |
| | | | | CRISPR proteins in diverse |
| | | | | bacterial species. Nat. |
| | | | | Microbiol. 1, 16085 |
| | | | | (2016). |
| AcrF7 | AcrF7_{Poe}(P. aeruginosa) | I-F | 67 | Pawluk, A. et al. |
| | | | | Inactivation of CRISPR- |
| | | | | Cas systems by anti- |
| | | | | CRISPR proteins in diverse |
| | | | | bacterial species. Nat. |
| | | | | Microbiol. 1, 16085 |
| | | | | (2016). |
| AcrF8 | Acrf8_{ZF40} (Pectobacterium | I-F | 92 | Pawluk, A. et al. |
| | phage Zf40) | | | Inactivation of CRISPR- |
| | | | | Cas systems by anti- |
| | | | | CRISPR proteins in diverse |
| | | | | bacterial species. Nat. |
| | | | | Microbiol. 1, 16085 |
| | | | | (2016). |
| AcrF9 | AcrF9_{Vpo} (Vibrio | I-F | 68 | Pawluk, A. et al. |
| | parahaemolyticus) | | | Inactivation of CRISPR- |
| | | | | Cas systems by anti- |
| | | | | CRISPR proteins in diverse |
| | | | | bacterial species. Nat. |
| | | | | Microbiol. 1, 16085 |
| | | | | (2016). |
| AcrF10 | AcrF10_{Sxf} (Shewanella | I-F | 97 | Pawluk, A. et al. |
| | xiamenensis) | | | Inactivation of CRISPR- |
| | | | | Cas systems by anti- |
| | | | | CRISPR proteins in diverse |
| | | | | bacterial species. Nat. |
| | | | | Microbiol. 1, 16085 |
| | | | | (2016). |
| AcrIIA1 | AcrIIA1_{Lmo} (Listeria | II-A | 149 | Rauch, B. J. et al. |
| | monocytogenes) | | | Inhibition of CRISPR-Cas9 |
| | | | | with bacteriophage |
| | | | | proteins. Cell 168, 150- |
| | | | | 158.e10 (2017). |
| AcrIIA2 | AcrllA2_{Lmo} (L | II-A | 123 | Rauch, B. J. et al. |
| | monocytogenes) | | | Inhibition of CRISPR-Cas9 |
| | | | | with bacteriophage |
| | | | | proteins. Cell 168, 150- |
| | | | | 158.e10 (2017). |
| AcrII3 | AcrllA3_{Lmo} (L | II-A | 125 | Rauch, B. J. et al. |
| | monocytogenes) | | | Inhibition of CRISPR-Cas9 |
| | | | | with bacteriophage |
| | | | | proteins. Cell 168, 150- |
| | | | | 158.e10 (2017). |
| AcrIIA4 | AcrllA4_{Lmo} (L | II-A | 87 | Rauch, B. J. et al. |
| | monocytogenes) | | | Inhibition of CRISPR-Cas9 |
| | | | | with bacteriophage |
| | | | | proteins. Cell 168, 150- |
| | | | | 158.e10 (2017). |
| AcrIIC1 | AcrllC1_{Nme} (Neisserio | II-C | 85 | Pawluk, A. et al. Naturally |
| | meningitidis) | | | occurring off-switches for |
| | | | | CRISPR-Cas9. Cell 167, |
| | | | | 1829-1838.e9 (2016). |
| AcrIIC2 | AcrllC2_{Nme} (N. | II-C | 123 | Pawluk, A. et al. Naturally |
| | meningitidis) | | | occurring off-switches for |
| | | | | CRISPR-Cas9. Cell 167, |
| | | | | 1829-1838.e9 (2016). |
| AcrIIC3 | AcrllC3_{Nme} (N. | II-C | 116 | Pawluk, A. et al. Naturally |
| | meningiridis) | | | occurring off-switches for |
| | | | | CRISPR-Cas9. Cell 167, |
| | | | | 1829-1838.e9 (2016). |

### Use of Modular CRISPR DNA Constructs in CRISPRi and CRISPRa Applications

[0288] Introduction/Background

[0289] Metabolic engineering relies heavily on the alteration of key genes involved, both directly and indirectly, in the metabolism, regulation, and catabolism of molecules. For example, it is often useful to decrease the expression of genes involved in siphoning cofactors or metabolic precursors used in competing metabolic pathways. However, the complexity of the metabolome makes it difficult to predict a priori, both the correct genes required for downregulation and the optimal amount of downregulation need to increase yield while limiting cellular toxicity. The epistatic, or nonadditive, nature or multiple genetic changes on metabolite production further complicates the prediction of the sets of changes that may be beneficial.

[0290] Thus, there is a strong need for technologies and methodologies that enable rapid, high-throughput sampling of regulation networks. There are many strategies that enable the alteration of expression. Altering the copy number of a gene, changing the preferred codon usage of a gene, changing the strength of the promoter driving a gene, altering the ribosomal binding site of a mRNA, and regulating the mRNA transcript have all been employed to effect changes in gene expression. However, each of these changes relies on making a genetic alteration. Depending on the organism used, genome editing is a time consuming, laborious, and often inefficient process. This both limits the scope of changes that can be tested, and in many organisms, prevents multiplexing multiple genomic changes at the same time.

[0291] As an alternative to genetic alterations, many researchers have used catalytically inactivated Cas9 (dCas9) to repress transcription in prokaryotic organisms. In prokaryotes, such as Corynebacterium glutamicum a dCas9 directed to a promoter or open reading frame (ORF) of a gene can block transcriptional initiation or elongation. Recent publications have also suggested the ability to upregulate genes by fusing transcriptional activation subunits to catalytically inactivated dCas9 genes. Libraries of guide RNAs, targeting different genes for downregulation have been used to screen or select for beneficial changes. Finally, activation of prokaryotic genes has been demonstrated in low throughput in E. coli.

[0292] However, there is a need to integrate these technologies into a successful and high throughput metabolic engineering campaign. Further, there is a need to combine and apply these disparate strategies into noncanonical organisms such as Corynebacterium glutamicum. There is an unmet need for applying large sets of dCas9-directed guide RNA libraries towards metabolic engineering campaigns.

[0293] The disclosure describes using Cas9 or dCas9 as a screening tool that will vastly increase the number of transcriptional perturbations that can be tested, while reducing the number of laborious genetic alterations that need to be made. The present disclosure addresses these concerns by leveraging the power and flexibility of the presently disclosed modular CRISPR DNA constructs for CRISPRi/CRISPRa applications. These approaches may be used alone, or, in certain embodiments, can be combined with CRISPR approaches for genome modification to both regulate expression from host genomic sequences and modify the genomic sequence as well. For example, the constructs of this disclosure can include both active and inactive CRISPR proteins encoding DNA, or multiple constructs can be produced where the different constructs contain different CRISPR (e.g., inactive and active) CRISPR forms.

[0294] Technological Overview

[0295] In some embodiments, the present disclosure teaches methods of modulating the expression of host cell genes via CRISPRi (CRISPR interference) and CRISPRa (CRISPR activation) technologies. In some embodiments, the presently disclosed technologies utilize catalytically inactivated (i.e., nuclease-deactivated) CRISPR endonucleases that have been mutated to no longer generate double DNA stranded breaks, but which are still able to bind to DNA target sites through their corresponding guide RNAs. In some embodiments, the present disclosure refers to these catalytically inactivated CRISPR enzymes as “dead CRISPR”, or “dCRISPR” enzymes. The “dead” modifier may also be used in reference to specific CRISPR enzymes, such as dead Cas9 (dCas9), or dead Cpf1 (dCpf1).

[0296] Without wishing to be bound by any one theory, the present inventors believe that the dCRISPR enzymes of this technology function by recruiting the catalytically inactivated dCRISPR enzyme to a target DNA sequence via a guide RNA, thereby permitting the dCRISPR enzyme to interact with the host cell's transcriptional machinery for a particular gene.

[0297] In some embodiments, The CRISPRi methods of the present disclosure utilize dCRISPR enzymes to occupy target DNA sequences necessary for transcription, thus blocking the transcription of the targeted gene (L. S. Qi et al., “Repurposing CRISPR as an RNA-Guided Platform for Sequence-Specific Control of Gene Expression.” Cell. 152, 1173-1183 (2013); see also L. A. Gilbert et al., “CRISPR-Mediated Modular RNA-Guided Regulation of Transcription in Eukaryotes.” Cell. 154, 442-451 (2013)). In other embodiments, the CRISPRi methods of the present disclosure utilize dCRISPR enzymes translationally fused, or otherwise tethered to one or more transcriptional repression domains, or alternatively utilize modified guide RNAs capable of recruiting transcriptional repression domains to the target site (e.g., tethered via aptamers, as discussed below).

[0298] In some embodiments, the CRISPRa methods of the present disclosure employ dCRISPR enzymes translationally fused or otherwise tethered to different transcriptional activation domains, which can be directed to promoter regions by guide RNAs. (See A. W. Cheng et al., “Multiplexed activation of endogenous genes by CRISPR-on, an RNA-guided transcriptional activator system.” Cell Res. 23, 1163-1171 (2013); see also L. A. Gilbert et al., “Genome-Scale CRISPR-Mediated Control of Gene Repression and Activation.” Cell. 159, 647-661 (2014)). In other embodiments, the CRISPRa methods of the present disclosure utilize modified guide RNAs that recruit additional transcriptional activation domains to upregulate expression of the target gene (e.g., tethered via aptamers, as discussed below).

[0299] In yet other embodiments, the presently disclosed invention also envisions exploiting dCRISPR enzymes and guide RNAs to recruit other regulatory factors to target DNA sites. In addition to recruiting transcriptional repressor or activation domains, as discussed above, the dCRISPR enzymes and guide RNAs of the present disclosure can be modified so as to recruit proteins with activities ranging from DNA methylation, chromatin remodelers, ubiquitination, sumoylation. Thus, in some embodiments, the dCRISPR enzymes and guide RNAs of the present disclosure can be modified to recruit factors with methyltransferase activity, demethylase activity, deamination activity, dismutase activity, alkylation activity, depurination activity, oxidation activity, pyrimidine dimer forming activity, integrase activity, transposase activity, recombinase activity, polymerase activity, ligase activity, helicase activity, photolyase activity, glycosylase activity, acetyltransferase activity, deacetylase activity, kinase activity, phosphatase activity, ubiquitin ligase activity, deubiquitinating activity, adenylation activity, deadenylation activity, sumoylating activity, desumoylating activity, ribosylation activity, deribosylation activity, myristoylation activity, remodelling activity, protease activity, oxidoreductase activity, transferase activity, hydrolase activity, lyase activity, isomerase activity, synthase activity, synthetase activity, demyristoylation activity, cytidine deaminase activity and any combinations thereof

[0300] In other embodiments, the dCRISPR enzymes and guide RNAs of the present disclosure can be modified to recruit one or more marker genes/composition, such as fluorescent proteins, gold particles, radioactive isotopes, GUS enzymes, or other known biological or synthetic compositions capable of being detected. This last embodiment would permit researchers to tag and track regions of a host cell's genome. As used herein, the term “cis regulatory factors” refers to any of the biological or synthetic compositions that can be recruited by the dCRISPR or guide RNAs of the present disclosure.

[0301] High Throughput CRISPRi and CRISPRa Vectors

[0302] In some embodiments, the present disclosure teaches vectors, kits, and methods for high throughput CRISPRi/CRISPRa genetic engineering of host cells. In some embodiments, the present disclosure leverages the power of the modular CRISPR constructs discussed in this application to carry out efficient, genome-wide gene expression modifications (increases or decreases). In some embodiments, the modular CRISPR constructs of the present disclosure are capable of modulating (increasing or decreasing) the expression of 1, 2, 3, 4, 5, 6, 7, 8, 9, 10, 11, 12, 13, 14, 15, 16, 17, 18, 19, 20, 21, 22, 23, 24, 25, 26, 27, 28, 29, 30, 31, 32, 33, 34, 35, 36, 37, 38, 39, 40, 41, 42, 43, 44, 45, 46, 47, 48, 49, 50, 51, 52, 53, 54, 55, 56, 57, 58, 59, 60, 61, 62, 63, 64, 65, 66, 67, 68, 69, 70, 71, 72, 73, 74, 75, 76, 77, 78, 79, 80, 81, 82, 83, 84, 85, 86, 87, 88, 89, 90, 91, 92, 93, 94, 95, 96, 97, 98, 99, 100, or more genes at a time.

[0303] In some embodiments, the present disclosure teaches modular CRISPR constructs comprising nucleic acids encoding for the CRISPRi or CRISPRa systems of the present disclosure. In some embodiments, the modular CRISPR constructs of the present disclosure comprise i) a first nucleic acid sequence encoding for a dCRISPR enzyme, and ii) a second nucleic acid encoding for a guide RNA capable of recruiting the dCRISPR enzyme to a DNA target site. In other embodiments, the present disclosure teaches that one or more parts of the CRISPRa/CRISPRi system may be excluded from the vector if they are already present in the host, or are otherwise being provided by a separate vector. Thus in some embodiments, a modular CRISPR construct will not encode for a dCRISPR enzyme. In other embodiments, the modular CRISPR construct will not encode for a guide RNA.

[0304] Persons having skill in the art will appreciate that the modular CRISPR constructs of the present disclosure may encode for more than one dCRISPR enzyme and/or more than one guide RNA (see e.g., FIG. 18A-B).

[0305] In some embodiments, the nucleic acids encoding for the dCRISPR enzyme and/or the guide RNA are contained in one or more insert parts of a modular CRISPR construct of the present disclosure. Thus, in some embodiments, the modular CRISPR constructs of the present disclosure permit users to quickly and efficiently modify the construct to add or subtract insert parts encoding for different guide RNAs (e.g., guide RNAs targeting different genes, or encoding aptamers capable of recruiting different cis regulatory factors, as discussed above), or encoding different dCRISPR enzymes (e.g., dCas9, or dCpf1, or dCRISPR protein fusions with various cis regulatory factors, as discussed above).

[0306] In some embodiments, the present disclosure teaches that an insert part of the modular CRISPR construct comprises only a single coding sequence. That is, in some embodiments, the insert parts of the present disclosure will only encode for a single dCRISPR, or will only encode for a single guide RNA. In other embodiments, the present disclosure teaches insert parts with desirable combinations of genes. For example, in some embodiments, an insert part could be designed so as to encode for multiple guide RNAs, such as guide RNAs targeting two or more genes in a biosynthetic pathway. In other embodiments, a single insert part could be designed to encode for more than one dCRISPR enzyme. In some embodiments, other genes may also be encoded in combination with either guide RNAs or dCRISPR enzymes.

[0307] In some embodiments, the insert parts of the present disclosure are designed to encode for selectable markers that can be associated with (i.e., used to demonstrate the presence of) one or more components encoded by the construct, e.g., to identify cells that contain the insert part. Thus, in some embodiments, an insert part can be designed to comprise a selectable marker together with the nucleic acid sequence encoding for a particular dCRISPR enzyme. The present disclosure further envisions the use of selectable markers for the selection of blocks of insert parts, such as for example, a block of guide RNAs targeting a specific biosynthetic pathway, or a block of insert parts coding for one or more cis regulatory factors.

[0308] In some embodiments, the insert parts of the present disclosure are designed to be self-contained, comprising all elements necessary for expression of an insert part. That is, in some embodiments, the insert parts of the present disclosure will contain all the necessary promoters and/or terminators necessary for an insert part to be expressed by the host cell machinery (not necessarily counting origin of replication or selectable marker required to maintain a plasmid). In other embodiments, expression of an insert part of the invention will rely on a promoter or terminator sequence located in a different insert part, such as one that is placed immediately upstream of a gene-coding insert part, or one which is placed at the beginning of a nucleic acid coding for a polycistronic mRNA in a single insert part, or spanning more than one insert part.

[0309] In some embodiments, the present disclosure teaches the use of inducible promoters to drive the expression of one or more of the insert parts of the modular CRISPR construct. Thus, in some embodiments, the present disclosure teaches the use of inducible promoters to drive the expression of a nucleic acid encoding for a dCRISPR enzyme. In other embodiments, the present disclosure teaches the use of an inducible promoter to drive the expression of a nucleic acid encoding for a guide RNA.

[0310] In some embodiments, all the functional parts of the modular cTAG vectors (e.g., all origins, markers, cargo, promoters, terminators, and all elements required for assembly) are comprised within insert DNA parts and can be readily exchanged via the DNA assembly or gene editing methods of the present disclosure. Thus, in specific embodiments, the presently disclosed modular construct permits for the rapid switching and testing of different promoters or terminators that are operably linked to the nucleic acid encoding the dCRISPR enzyme. In other specific embodiments, the presently disclosed modular construct permits for the rapid switching and testing of different promoters or terminators that are operably linked to the nucleic acid encoding the sgRNA or crRNA/tracrRNA or guide RNA or CRISPR enzyme.

[0311] Origins of Replication

[0312] In some embodiments, the present disclosure teaches the use of origins of replication to maintain (i.e., continue to replicate) a plasmid in one or more species. Persons having skill in the art will be familiar with various available origin of replication sequences. Common features of origins of replications for bacterial, archael, eukaryotic, and multicellular organisms is discussed in Leonard and Mechali, “DNA replication Origins” Cold Spring Harb Perspect Biol 2013 October; 5(10). A non-limiting list of common origins of replication are provided below in Table 4.

TABLE 4
list of common vectors and their origin of replication.

| Common | | | |
|---|---|---|---|
| Vectors | Copy Number+ | ORI | Control |
| pUC | ~500-700 | pMB1 (derivative) | Relaxed |
| pBR322 | ~15-20 | pMB1 | Relaxed |
| pET | ~15-20 | pBR322 | Relaxed |
| pGEX | ~15-20 | pBR322 | Relaxed |
| pColE1 | ~15-20 | ColE1 | Relaxed |
| pR6K | ~15-20 | R6K* | Stringent |
| pACYC | ~10 | p15A | Relaxed |
| pSC101 | ~5 | pSC101 | Stringent |
| pBluescript | ~300-500 | ColE1 (derivative) and F1** | Relaxed |
| pGEM | ~300-500 | pUC and F1** | Relaxed |

[0313] Tethering Cis Regulatory Factors (Transcriptional Modulators)

[0314] In some embodiments, the present disclosure teaches the use of a transcriptional modulator. Thus, in some embodiments, the cis regulatory factor is a transcriptional modulator. In some embodiments, transcriptional modulators are chosen based on their ability to further repress, or alternatively, to activate the expression of a gene targeted by the CRISPRi/CRISPRa methods of the present disclosure. In some embodiments, the present disclosure teaches tethering or translationally fusing a transcriptional modulator with the dCRISPR enzyme (i.e., through the use of a fusion construct).

[0315] Fusion constructs may generally be prepared using standard techniques. For example, DNA sequences encoding the peptide components may be assembled separately, and ligated into an appropriate construct, such as an insert part. The ligated DNA sequences are operably linked to suitable transcriptional or translational regulatory elements. The 5′ or 3′ end of the DNA sequence encoding one peptide component is ligated, with or without a peptide linker, to the 3′ or 5′ end, respectively, of a DNA sequence encoding the second peptide component so that the reading frames of the sequences are in phase. This permits translation into a single fusion protein that retains the biological activity of both component peptides.

[0316] In some embodiments, the dCRISPR enzyme and the transcriptional modulator domain are linked via a peptide linker. A peptide linker sequence may be employed to separate the first and the second peptide components by a distance sufficient to ensure that each peptide folds into its secondary and tertiary structures. Such a peptide linker sequence is incorporated into the fusion protein using standard techniques well known in the art. Suitable peptide linker sequences may be chosen based on the following factors: (1) their ability to adopt a flexible extended conformation; (2) their inability to adopt a secondary structure that could interact with functional regions on the first and second peptides; and (3) the lack of hydrophobic or charged residues that might react with the peptide functional regions. In certain embodiments, the peptide linker sequences contain Gly, Asn and Ser residues. Other near neutral amino acids, such as Thr and Ala may also be used in the linker sequence.

[0317] In some embodiments, the present disclosure teaches the use of protein-protein interaction domains to tether the transcriptional modulator domains to the dCRISPR. Thus in some embodiments, the sequence of the dCRISPR enzyme is translationally fused to a first protein-protein interaction domain (PP1) capable of dimerizing with a second protein-protein interaction domain (PP2) that is translationally fused to the transcriptional modulator (or other cis regulatory factor). When expressed, each of the dCRISPR-PP1 and the PP2-Transcriptional Modulator will dimerize, thus recruiting the transcriptional modulator to the DNA target site. Persons having skill in the art will be aware of methods of using naturally occurring, or synthetic protein-protein interaction domains to create in-vivo dimers. (See Giescke et al., 2006 “Synthetic protein-protein interaction domains created by shuffling Cys2His2 zinc-fingers.” Mol Syst Biol 2: 2006.0011).

[0318] In other embodiments, the present disclosure also teaches modified guide RNAs with RNA aptamers capable of recruiting one or more cis regulatory factors. The RNA aptamers of the present disclosure may be operably linked to the 5′ or 3′ end of a guide RNA, and are designed so as to not affect dCRISPR binding to a DNA target site. Instead, the RNA aptamers provide an additional tether from which to recruit one or more cis regulatory factors, such as transcriptional modulators.

[0319] In some embodiments, the present disclosure teaches customized RNA aptamers designed to directly interact with one or more cis regulatory factors. In other embodiments, the present disclosure teaches use of known aptamers targeting specific sequences. Thus, in some embodiments, the present disclosure envisions guide RNAs with validated RNA aptamers, which then bind to their natural targets, which are in turn translationally fused to one or more cis regulatory factor (i.e., guide_RNA-Aptamer-Aptamer_Target-Cis_Regulatory_Factor). In some embodiments, guide RNAs that incorporate RNA aptamers to tether cis regulatory factors are referred to as scaffold RNAs (scRNAs). (Zalatan J G, et al. “Engineering complex synthetic transcriptional programs with CRISPR RNA scaffolds.” Cell. 2015; 160:339-350). The scRNAs are designed by extending the guide RNA sequence with orthogonally acting protein-binding RNA aptamers. Each scRNA can encode information both for DNA target recognition and for recruiting a specific repressor or activator protein. By changing the DNA targeting sequence or the RNA aptamers in a modular fashion, multiple dCas9-scRNAs can simultaneously activate or repress multiple genes in the same cell

[0320] For example, an improvement, termed the synergistic activation mediator (SAM) system, was achieved by adding MS2 aptamers to a guide RNA. The MS2 aptamers were designed to recruit cognate MS2 coat protein (MCP), which were fused to p65AD and heat shock factor 1 (HSF1) (Dominguez et al., 2016 “Beyond editing; repurposing CRISPR-Cas9 for precision genome regulation and interrogation” Nat Rev Mol Cel Biol January 17(1) 5-15). The SAM technology, together with dCas9-VP64, further increased endogenous gene activation compared with dCas9-VP64 alone and was shown to activate 10 genes simultaneously. (Konermann S, et al. “Genome-scale transcriptional activation by an engineered CRISPR-Cas9 complex.” Nature. 2014; 517:583-588). Similar results may be achieved through the use of other validated aptamer-scaffold protein combinations, such as PP7 or com. (Zalatan J G, et al. “Engineering complex synthetic transcriptional programs with CRISPR RNA scaffolds.” Cell. 2015; 160:339-350).

[0321] In some embodiments, the present disclosure also envisions the use of double-sided aptamers capable of tethering a dCRISPR enzyme to one or more cis regulatory factors. The double sided aptamers of the present disclosure function similarly to the aptamers discussed above, but are capable of binding both the dCRISPR protein, and the cis regulatory factor. In one illustrative example, the dCRISPR enzyme would be translationally fused to an MS2 coat protein domain, and the cis regulatory element (a VP16 domain) would be translationally fused to a PP7 domain. The double-sided RNA aptamer would comprise an MS2 binding domain on one end, and a PP7 binding domain on another end. Thus, in some embodiments, the double-sided aptamers of the present disclosure can would be expected to form the following generic structure: dCRISPR-Aptamer_Target-Aptamer_Side1-Aptamer_Side2-Aptamer_Target-Cis_Regulatory_Factor.

[0322] A non-limiting list of the transcriptional activation domains compatible with the presently disclosed invention include: fragments of transcription regulatory domains and fragments of domains having transcription regulation function of VP16, VP64, VP160, EBNA2, E1A, Gal4, Oaf1, Leu3, Rtg3, Pho4, Gln3, Gcn4, Gli3, Pip2, Pdr1, Pdr3, Lac9, Teal, p53, NFAT, Sp1 (e.g., Sp1a), AP-2 (e.g., Ap-2a), Sox2, NF-κB, MLL/ALL, E2A, CREB, ATF, FOS/JUN, HSF1, KLF2, NF-1L6, ESX, Oct1, Oct2, SMAD, CTF, HOX, Sox2, Sox4, VPR, RpoZ, or Nanog. In some embodiments the transcriptional activator is VPR (see Kiani S. et al., “Cas9 gRNA engineering for genome editing, activation and repression” Nature Methods 12, 1051-1054 (2015)).

[0323] A non-limiting list of the transcriptional repressors compatible with the presently disclosed invention include: Mxi1, Tbx3, KRAB (Kruppel-associated box, Margolin, J. F, et al. “Kruppel-associated boxes are potent transcriptional repression domains.” Proc. Natl. Acad. Sci. USA 91, 4509-4513 (1994)), EnR, or SID, SID4X (a tandem repeat of four SID domains linked by short peptide linkers), PIE-1, IAA28-RD among others.

[0324] In some embodiments, the transcriptional activation domains of the present disclosure comprise the activation domains of Table 5. Nine-amino-acid transactivation domain (9 aaTAD) defines a novel domain common to a large superfamily of eukaryotic transcription factors represented by Gal4, Oaf1, Leu3, Rtg3, Pho4, GIn3, Gcn4 in yeast and by p53, NFAT, NF-κB and VP16 in mammals. Prediction for 9 aa TADs (for both acidic and hydrophilic transactivation domains) is available online from ExPASy™ and EMBnet™ databases.

TABLE 5
Non-limiting examples of transcriptional activa-
tion domains.

| Transcription Factor | |
|---|---|
| Source | 9 aa TAD |
| P53 TAD1 | ETFSDLWKL (SEQ ID NO: 114) |
| P53 TAD2 | DDIEQWFTE (SEQ ID NO: 115) |
| MLL | DIMDFVLK (SEQ ID NO: 116) |
| EA2 | DLLDFSMMF (SEQ ID NO: 117) |
| Rtg3 | ETLDFSLVT (SEQ ID NO: 118) |
| CREB | RKILNDLSS (SEQ ID NO: 119) |
| CREBaB6 | EAILAELKK (SEQ ID NO: 120) |
| Gli3 | DDVVQYLNS (SEQ ID NO: 121) |
| Gal4 | DDVYNYLFD (SEQ ID NO: 122) |
| Oaf1 | DLFDYDFLV (SEQ ID NO: 123) |
| Pip2 | DFFDYDLLF (SEQ ID NO: 124) |
| Pdr1 | EDLYSILWS (SEQ ID NO: 125) |
| Pdr3 | TDLYHTLWN (SEQ ID NO: 126) |

[0325] Guide RNA Multiplexing Systems

[0326] In some embodiments, the present disclosure teaches use of guide RNA multiplexing systems. That is, in some embodiments, the present disclosure teaches methods of expressing more than one guide RNA, for example using multiple promoters or polycistronic transcripts. In some embodiments, the present disclosure teaches the use of Csy4 multiplex systems. When overexpressed, Csy4 efficiently cleaves gRNAs sandwiched between 28 base Csy4 recognition sites. CpfI can also process multiple gRNAs. (See Murata et al. 2018, “Highly multiplexed genome engineering using CRISPR/CAS9 gRNA arrays” PLOS ONE 13(9): e0198714, which is hereby incorporated in its entirety for all purposes). If Csy4 or other multiplexing system is not expressed, the gRNAs cannot be released, adding temporal and/or spatial control to the system

[0327] In some embodiments, a guide RNA of the present disclosure is flanked by ribonuclease recognition sites. A ribonuclease (abbreviated as RNase) is a nuclease that catalyzes the hydrolysis of RNA. A ribonuclease may be an endoribonuclease or an exoribonuclease. An endoribonuclease cleaves either single-stranded or double-stranded RNA. An exoribonuclease degrades RNA by removing terminal nucleotides from either the 5′ end or the 3′ end of the RNA. In some embodiments, a guide RNA of the present disclosure is flanked by Csy ribonuclease recognition sites (e.g., Csy4 ribonuclease recognition sites). Csy4 is an endoribonuclease that recognizes a particular RNA sequence, cleaves the RNA, and remains bound to the upstream fragment. In some embodiments, a Csy ribonuclease (e.g., Csy4 ribonuclease) is used to release a guide RNA from an engineered nucleic acid transcript. Thus, in some embodiments, cells are co-transfected with an engineered construct that comprises a nucleotide sequence encoding a guide RNA flanked by Csy4 or other Cas6 ribonuclease recognition sites and an engineered nucleic acid encoding a Csy4 or other Cas6 ribonuclease. Alternatively, or in addition, the cell may stably express, or be modified to stably express, a Csy4 or other Cas6 ribonuclease. In some embodiments, a Csy ribonuclease (e.g., Csy4 ribonuclease) is from Pseudomonas aeruginosa, Staphylococcus epidermidis, Pyrococcus furiosus or Sulfolobus solfataricus. Other ribonucleases and ribonuclease recognitions sites are contemplated herein (see, e.g., Mojica, F. J. M. et al., CRISPR-Cas Systems, RNA-mediated Adaptive Immunity in Bacteria and Archaea, Barrangou, Rodolphe, van der Oost, John (Eds.), 2013, ISBN 978-3-642-34657-6, of which the subject matter relating to ribonucleases/recognition sites is incorporated by reference herein).

[0328] In some embodiments, a ribonuclease recognition site (e.g., Csy4 ribonuclease recognition site) is 10 to 50 nucleotides in length. For example, a Csy ribonuclease recognition site may be 10 to 40, 10 to 30, 10 to 20, 20 to 50, 20 to 40 or 20 to 30 nucleotides in length. In some embodiments, a Csy ribonuclease recognition site is 10, 11, 12, 13, 14, 15, 16, 17, 18, 19, 20, 21, 22, 23, 24, 25, 26, 27, 28, 29, 30, 31, 32, 33, 34, 35, 36, 37, 38, 39, 40, 41, 42, 43, 44, 45, 46, 47, 48, 49 or 50 nucleotides in length. In some embodiments, a Csy ribonuclease recognition site (e.g., Csy4ribonuclease recognition site) is 28 nucleotides in length. Csy homologs are also contemplated herein (see, e.g., Mojica, F. J. M. et al., CRISPR-Cas Systems, RNA-mediated Adaptive Immunity in Bacteria and Archaea, Barrangou, Rodolphe, van der Oost, John (Eds.), 2013, ISBN 978-3-642-34657-6, of which the subject matter relating to ribonucleases/recognition sites is incorporated by reference herein). Reference is also made to U.S. patent serial No. U.S. Pat. No. 9,745,610 and U.S. published application US 2017/022499, each of which is hereby incorporated in its entirety for all purposes.

### Expression, Purification, and Delivery

[0329] In some embodiments, the present disclosure teaches methods and compositions of vectors, constructs, and nucleic acid sequences encoding CRISPR complexes. In some embodiments, the present disclosure teaches plasmids for transgenic or transient expression of the Cas9 or Cpf1 proteins. In some embodiments, the present disclosure teaches a plasmid encoding chimeric Cas9 or Cpf1 proteins comprising in-frame sequences for protein fusions of one or more of the other polypeptides described herein, including, but not limited to a ligase, a linker, and an NLS.

[0330] In some embodiments, the plasmids and vectors of the present disclosure will encode for the Cas9/Cpf1 protein(s) and also encode the crRNA/tracrRNA/sgRNA, and/or donor insert sequences of the present disclosure. In other embodiments, the different components of the engineered complex can be encoded in one or more distinct plasmids.

[0331] In some embodiments, the plasmids of the present disclosure can be used across multiple species. Thus, in certain embodiments, a single plasmid can be designed to allow for the introduction of an insert part into multiple species, e.g., multiple bacterial species, e.g., Corynebacterium glutamicum and E. coli. In other embodiments, the plasmids of the present disclosure are tailored to the organism being transformed. In some embodiments, the sequences of the present disclosure will be codon-optimized to express in the organism whose genes are being edited. Persons having skill in the art will recognize the importance of using promoters providing adequate expression for gene editing. In some embodiments, the plasmids for different species will require different promoters.

[0332] In some embodiments, the plasmids and vectors of the present disclosure are selectively expressed in the cells of interest. Thus in some embodiments, the present application teaches the use of ectopic promoters, tissue-specific promoters, developmentally regulated promoters, or inducible promoters. In some embodiments, the present disclosure also teaches the use of terminator sequences.

[0333] In some embodiments, the present disclosure also teaches methods of expressing and purifying Cpf1 and/or Cas9 endonuclease protein. In some embodiments, the present disclosure teaches that the proteins of the present disclosure may be produced by any of the commercially available protein production and purification kits or services. For example, in some embodiments, the present disclosure teaches methods of cloning Cas9 and/or Cpf1 into a vector with a polyhistidine (His), glutathione s-transferase (GST), or other purification tag chimeric fusion. In some embodiments, the present disclosure teaches a variety of prokaryotic and eukaryotic organisms, and cell-free protein production systems. For example, in some embodiments, the present disclosure teaches expression of protein expression plasmids in E. coli BL21. In some embodiments, the protein production system will be inducible, to reduce the effects of protein toxicity. For example, in some embodiments, the present disclosure teaches methods of using the IPTG or an arabinose induction system.

[0334] In some embodiments, the present disclosure also teaches various protein purification schemes, including affinity tags (His-Nickel, GST-Glutathione, etc.). In some embodiments, the present disclosure teaches both native and denaturing conditions for protein purification.

[0335] In other embodiments, the present disclosure teaches production of Cas9 and/or Cpf1 via one or more protein production services, including, but not limited to GenScript®, ThermoFisher®, and NovoProtein®.

### Transformation

[0336] In some embodiments, the present disclosure teaches the use of transformation of the plasmids and vectors disclosed herein. Persons having skill in the art will recognize that the plasmids of the present disclosure can be transformed into cells through any known system as described in other portions of this specification. For example, in some embodiments, the present disclosure teaches transformation by particle bombardment, chemical transformation, Agrobacterium transformation, nano-spike transformation, electroporation and virus transformation.

[0337] In some embodiments, the vectors of the present disclosure may be introduced into the host cells using any of a variety of techniques, including transformation, transfection, transduction, viral infection, gene guns, or Ti-mediated gene transfer. Particular methods include calcium phosphate transfection, DEAE-Dextran mediated transfection, lipofection, or electroporation (Davis, L., Dibner, M., Battey, I., 1986 “Basic Methods in Molecular Biology”). Other methods of transformation include for example, lithium acetate transformation and electroporation (see, e.g., Gietz et al., Nucleic Acids Res. 27:69-74 (1992); Ito et al., J. Bacterol. 153:163-168 (1983); and Becker and Guarente, Methods in Enzymology 194:182-187 (1991)). In some embodiments, transformed host cells are referred to as recombinant host strains.

[0338] In some embodiments, the present disclosure teaches high throughput transformation of cells using the 96-well plate robotics platform and liquid handling machines of the present disclosure.

[0339] In some embodiments, the present disclosure teaches methods for getting exogenous protein (Cpf1/Cas9 and DNA ligase), RNA (crRNA/tracRNA/GuideRNA), and DNA (insert DNA part or modular CRISPR construct) into the cell. Various methods for achieving this have been described previously including direct transfection of protein/RNA/DNA or DNA transformation followed by intracellular expression of RNA and protein (Dicarlo, J. E. et al. “Genome engineering in Saccharomyces cerevisiae using CRISPR-Cas systems.” Nucleic Acids Res (2013). doi:10.1093/nar/gkt135; Ren, Z. J., Baumann, R. G. & Black, L. W. “Cloning of linear DNAs in vivo by overexpressed T4 DNA ligase: construction of a T4 phage hoc gene display vector.” Gene 195, 303-311 (1997); Lin, S., Staahl, B. T., Alla, R. K. & Doudna, J. A. “Enhanced homology-directed human genome engineering by controlled timing of CRISPR/Cas9 delivery.” Elife 3, e04766 (2014)).

[0340] In some embodiments, the present disclosure teaches screening transformed cells with one or more selection markers as described above. In one such embodiment, cells transformed with a vector comprising a kanamycin resistance marker (KanR) are plated on media containing effective amounts of the kanamycin antibiotic. Colony forming units visible on kanamycin-laced media are presumed to have incorporated the vector cassette into their genome. Insertion of the desired sequences can be confirmed via PCR, restriction enzyme analysis, and/or sequencing of the relevant insertion site.

[0341] In other embodiments, a portion, or the entire complexes of the present disclosure can be delivered directly to cells. Thus, in some embodiments, the present disclosure teaches the expression and purification of the polypeptides and nucleic acids of the present disclosure. Persons having skill in the art will recognize the many ways to purify protein and nucleic acids. In some embodiments, the polypeptides can be expressed via inducible or constitutive protein production systems such as the bacterial system, yeast system, plant cell system, or animal cell systems. In some embodiments, the present disclosure also teaches the purification of proteins and or polypeptides via affinity tags, or custom antibody purifications. In other embodiments, the present disclosure also teaches methods of chemical synthesis for polynucleotides.

[0342] In some embodiments, persons having skill in the art will recognize that viral vectors or plasmids for gene expression can be used to deliver the complexes disclosed herein. Virus-like particles (VLP) can be used to encapsulate ribonucleoprotein complexes, and purified ribonucleoprotein complexes disclosed herein can be purified and delivered to cells via electroporation or injection.

### Kits

[0343] In some embodiments, the disclosure provides kits containing any one or more of the elements disclosed in the above methods and compositions. In some embodiments, the kit comprises a modular CRISPR DNA construct and instructions for using the kit and any necessary reagents or reactants. In some embodiments, the vector system comprises (a) a modular CRISPR DNA construct (b) a CRISPR complex, including a CRISPR endonuclease protein, and necessary target guide RNA(s) (or sequences encoding said items), and optionally (c) insert DNA parts, as describe supra in this application.

[0344] Elements may be provided individually or in combinations, and may be provided in any suitable container, such as a vial, a bottle, or a tube, or host cell, or plasmid. In some embodiments, the kit includes instructions in one or more languages, for example in more than one language.

[0345] In some embodiments, a kit comprises one or more reagents for use in a process utilizing one or more of the elements described herein (e.g., purified Cpf1 endonuclease). Reagents may be provided in any suitable container. For example, a kit may provide one or more reaction or storage buffers. Reagents may be provided in a form that is usable in a particular assay, or in a form that requires addition of one or more other components before use (e.g. in concentrate or lyophilized form). A buffer can be any buffer, including but not limited to a sodium carbonate buffer, a sodium bicarbonate buffer, a borate buffer, a Tris buffer, a MOPS buffer, a HEPES buffer, and combinations thereof. In some embodiments, the buffer is alkaline. In some embodiments, the buffer has a pH from about 7 to about 10. In some embodiments, the kit comprises one or more oligonucleotides corresponding to a crRNA sequence for insertion into a vector so as to operably link the crRNA sequence and a regulatory element.

### EXAMPLES

[0346] The following examples are given for the purpose of illustrating various embodiments of the disclosure and are not meant to limit the present disclosure in any fashion. Changes therein and other uses which are encompassed within the spirit of the disclosure, as defined by the scope of the claims, will occur to those skilled in the art.

### Example 1: One-Pot In Vitro Modular CRISPR Cloning

[0347] This example describes the generation of plasmid 13001009086 (SEQ ID NO: 82) by transfer of an insert from one plasmid to another in a one-pot reaction. See, FIG. 4.

[0348] Both plasmids carry cloning tags flanking the region of interest (cTAG K [SEQ ID NO: 78]/cTAG L [SEQ ID NO: 79] and cTAG K′ [SEQ ID NO: 80]/cTAG L′ [SEQ ID NO: 81]). In order to drive the cloning reaction towards the edited plasmid, the Cpf1 spacers are in opposite orientations on the recipient and donor plasmids (K/K′ and L/L′ respectively). This inside-out/outside-in digest removes the Cpf1 spacer in the final product, eliminating re-cutting of the desired product (see, curved arrows in FIG. 4, depicting inside-out digestion in the '485 plasmid and outside-in digestion in the '784 plasmid). The Cas9 spacers remain, enabling iterative editing at this site. Thus, the MegaModular construct allows for a rapid single-pot reaction scheme that enables iterative editing.

[0349] Cpf1 protein was synthesized by Genscript and the crRNAs by Synthego. For the one-pot cleavage/ligation reaction, the Cpf1 protein complexed with the crRNAs (crRNA 1 and crRNA 3), was added to the plasmids (13000789485—SEQ ID NO: 83 and 13000823784—SEQ ID NO: 84) and DNA ligase in buffer containing ATP. These components were cycled at temperatures optimized for cleavage and ligation.

[0350] The reaction was transformed into E. coli and positive clones were sequenced to confirm insertion of the new insert and loss of the Cpf1 spacers.

[0351] For deletions, the Cpf1 sites within cloning tags used must generate compatible overhangs to allow for plasmid closure. cTAG L′ was designed to contain two Cpf1 spacers, one for insertion where the overhang is incompatible with cTAG K′ and a second one for deletion where the overhang is compatible with cTAG K′.

### Example 2: In Vitro Modular CRISPR Cloning

[0352] This example was designed to demonstrate the flexibility of CRISPR cloning. As an initial step, several resistance plasmids encoding for Kanamycin or Chloramphenicol resistance genes were created from source vectors pzHR039 (SEQ ID No: 100) and 13000223370 (SEQ ID No: 101), respectively. The Kanamycin resistance plasmids were each designed so as to include various Cpf1 landing sites flanking the GFP gene (when digested, these plasmids produce “the kanamycin resistant plasmid backbone”). The Chloramphenicol resistance plasmids were each designed so as to include various Cpf1 landing sites flanking the Chloramphenicol resistance gene (when digested, these plasmids produce “the chloramphenicol resistant insert”). Sequences and vector maps for each plasmid used in this Example are disclosed in Table 6.

[0353] Each Kanamycin and Chloramphenicol resistant plasmid was initially linearized with type-II restriction enzymes KpnI-HF and PvuI-HF, respectively (both commercially available from NEB). The location of the KpnI and PvuI restriction sites on each plasmid are noted in the vector maps provided in FIGS. 7-14. After linearization, the resistance plasmids were no longer capable of self-replication in a bacterial host system.

[0354] Linearized resistance plasmids were then mixed with a pre-incubated mixture of 15 μg (1.58 μM final concentration) of Cpf1 enzyme and 2 μL of 5 μM of each guide RNA described below (0.167 μM final concentration) in a 60 μL reaction to form active CRISPR complexes.

[0355] The Cpf1 enzyme used in this Example was commercially obtained from IDT. The Cpf1 was sourced from Acidaminococcus sp. Cpf1 (AsCpf1). The enzyme was further modified to comprise 1 N-terminal nuclear localization sequence (NLS) and 1 C-terminal NLSs, as well as 3 N-terminal FLAG tags and a C-terminal 6-His tag.

[0356] The guide RNAs used in this example were custom ordered from IDT. Each guide RNA was designed to target a different CRISPR landing site located within the linearized resistance plasmid. In this Example, the Cpf1 landing sites of the backbone plasmid were excised, but restored upon ligation of the insert. Table 6 provides the guide sequence portion of each guide RNA used. The CRISPR complexes in the mixture were thus designed to cleave out the GFP gene from each kanamycin resistant plasmid to generate kanamycin resistant plasmid backbones (see FIG. 5, second panel). The CRISPR complexes in the mixture were also designed to cleave out the chloramphenicol resistance gene from the chloramphenicol resistance plasmid to generate chloramphenicol resistant inserts (see FIG. 5, second panel). The kanamycin resistant plasmid backbone and the chloramphenicol resistant insert of each reaction were similarly designed to generate compatible overhangs that would result in hybridization of the ends to produce a “dual resistant” kanamycin and chloramphenicol plasmid.

[0357] The linearized resistance plasmid mixtures comprising the Cpf1 and guide RNAs were allowed to incubate for 3 hours at 37 degrees Celsius in the manufacturer's recommended Cpf1 buffer. Selected reactions were run on agarose gels and the resulting fragments were purified using standard DNA extraction kits (Zymo Research kit, used according to manufacturer's instructions). Purified (control) and unpurified (test).

[0358] DNA fragments comprising the kanamycin resistant plasmid backbone and the chloramphenicol resistant insert, each comprising two compatible Cpf1 sticky ends were combined in a new reactions with or without a T4 DNA ligase (commercially available form NEB) and transformed into NEB10-B cells (commercially available from NEB). Transformed cells were plated on media augmented with both Kanamycin and Chloramphenicol designed to prevent the growth of any cells that did not contain functional resistance plasmids.

[0359] Individual colonies were sent for Sanger sequencing to confirm junctions of Cpf1 cloning. Recovered colonies were also validated via PCR using primers described in Table 6. FIG. 5 illustrates the general experimental design described above, except that the plasmids were linearized prior to Cpf1 digestion, as described above.

TABLE 6
List of sequences used in this Example 2

| Component | Description | SEQ ID NO |
|---|---|---|
| GFP Cpf1 cTAG M fwd | 5′ | SEQ ID No: 86 |
| | CAGCACCTGGATTACCCTGTTATCCCTAGT | |
| | TTTGGGTTAAAGATGGTTAAATGATTCG | |
| | AAAATAATAAAGGGAAAATCA 3′ | |
| GFP Cpf1 cTAG N fwd | 5′ | SEQ ID No: 87 |
| | CAGCACCTGGATTACCCTGTTATCCCTAGT | |
| | TTTGGGATGTTAAGAGTCCCTATCTTCG | |
| | AAAATAATAAAGGGAAAATCA 3′ | |
| GFP Cpf1 cTAG P fwd | 5′ | SEQ ID No: 88 |
| | CAGCACCTGGATTACCCTGTTATCCCTAGT | |
| | TTTGAGGAGTGTTCAGTCTCCGTGAACT | |
| | CGAAAATAATAAAGGGAAAATCA 3′ | |
| GFP Cpf1 cTAG O rvs | 5′ | SEQ ID No: 89 |
| | CGCTTCCTCCTGAAAATGCAGCTAGGTAGT | |
| | TTTGACCGCCCCCCCCATACCCCAATCG | |
| | ACATGCCGAACTCAGAAGTGA 3′ | |
| GFP Cpf1 cTAG N rvs | 5′ | SEQ ID No: 90 |
| | CGCTTCCTCCTGAAAATGCAGCTAGGTAGT | |
| | TTTGGGATGTTAAGAGTCCCTATCTTCG | |
| | ACATGCCGAACTCAGAAGTGA 3′ | |
| CAT01 Cpf1 cTAG M fwd | 5′ | SEQ ID No: 91 |
| | TTTGGGTTAAAGATGGTTAAATGATTCG | |
| | ACATACACATAAAGTAGCTTGCG 3′ | |
| CAT01 Cpf1 cTAG N fwd | 5′ | SEQ ID No: 92 |
| | TTTGGGATGTTAAGAGTCCCTATCTTCGA | |
| | CATACACATAAAGTAGCTTGCG 3′ | |
| CAT01 Cpf1 cTAG P fwd | 5′ | SEQ ID No: 93 |
| | TTTGAGGAGTGTTCAGTCTCCGTGAACT | |
| | CGACATACACATAAAGTAGCTTGCG 3′ | |
| CAT01 Cpf1 cTAG N rvs | 5′ | SEQ ID No: 94 |
| | TTTGGGATGTTAAGAGTCCCTATCTTCG | |
| | ACTGGAAGGACAAGGGGGACC 3′ | |
| CAT01 Cpf1 cTAG O rvs | 5′ | SEQ ID No: 95 |
| | TTTGACCGCCCCCCCCATACCCCAATCG | |
| | ACTGGAAGGACAAGGGGGACC 3′ | |
| Cpf1 cTAG M | 5′ TTTGGGTTAAAGATGGTTAAATGAT 3′ | SEQ ID No: 96 |
| RNA targeting cTAG M | 5′ | SEQ ID NO: 110 |
| | UAAUUUCUACUCUUGUAGAUGGUUAAAGAU | |
| | GGUUAAAUGAU 3′ | |
| Cpf1 cTAG N | 5′ TTTGGGATGTTAAGAGTCCCTATCT 3′ | SEQ ID No: 97 |
| RNA targeting cTAG N | 5′ | SEQ ID NO: 111 |
| | UAAUUUCUACUCUUGUAGAUGGAUGUUAAG | |
| | AGUCCCUAUCU 3′ | |
| Cpf1 cTAG O | 5′ TTTGACCGCCCCCCCCATACCCCAA 3′ | SEQ ID No: 98 |
| RNA targeting cTAG O | 5′ | SEQ ID NO: 112 |
| | UAAUUUCUACUCUUGUAGAUACCGCCCCCC | |
| | CCAUACCCCAA 3′ | |
| Cpf1 cTAG P | 5′ TTTGAGGAGTGTTCAGTCTCCGTGAAC 3′ | SEQ ID No: 99 |
| RNA targeting cTAG P | 5′ | SEQ ID NO: 113 |
| | UAAUUUCUACUCUUGUAGAUAGGAGUGUUC | |
| | AGUCUCCGUGAAC 3′ | |
| pzHR039 | Source for Kanamycin resistance and GFP. See | SEQ ID NO: 100 |
| | listing for full sequence | |
| 13000223370 | Source for Chloramphenicol resistance and GFP. | SEQ ID NO: 101 |
| | See listing for full sequence | |
| pJDI427 | GFP Cpf1 cTAGs M and N KanR CENARS | SEQ ID NO: 102 |
| | TRP1 see listing for full sequence | FIG. 7 |
| pJDI429 | GFP Cpf1 cTAGs N and O KanR CENARS | SEQ ID NO: 103 |
| | TRP1 see listing for full sequence | FIG. 8 |
| pJDI430 | GFP Cpf1 cTAGs N and P KanR CENARS | SEQ ID NO: 104 |
| | TRP1 see listing for full sequence | FIG. 9 |
| pJDI431 | GFP Cpf1 cTAGs O and P KanR CENARS | SEQ ID NO: 105 |
| | TRP1 see listing for full sequence | FIG. 10 |
| pJDI432 | pJET AmpR CmR Cpf1 cTAGs M and N see | SEQ ID NO: 106 |
| | listing for full sequence | FIG. 11 |
| pJDI434 | pJET AmpR CmR blunt Cpf1 cTAGs N and O | SEQ ID NO: 107 |
| | see listing for full sequence | FIG. 12 |
| pJDI435 | pJET AmpR CmR blunt Cpf1 cTAGs N and P | SEQ ID NO: 108 |
| | see listing for full sequence | FIG. 13 |
| pJDI436 | pJET AmpR CmR blunt Cpf1 cTAGs O and P | SEQ ID NO: 109 |
| | see listing for full sequence | FIG. 14 |

***non-underlined portion of guide RNA for SEQ ID NOs: 110-113 is the chemically modified Alt-R RNA from IDT. The homologous region of sequence to the respective cTAGs (i.e. M-P) is underlined.

[0360] The results of this experiment are shown in Table 7 and FIG. 6. Reaction numbers for each transformation are shown along the top row, with guide RNAs used listed along the left-hand column of Table 7. The comparison of identical Cpf1 reactions with and without ligase showed a 9.9-fold increase in transformants in the presence of ligase enzyme, indicating that colony growth was due to formation of the double kanamycin and chloramphenicol resistant plasmid after Cpf1 digestion. The no-ligase reactions are matched controls designed to establish that the reactions are specific, and were not simply due to the presence of contaminating levels of undigested resistance plasmids.

[0361] Sixteen individual colonies were Sanger sequenced to verify both the upstream and downstream cloning junctions. In seven of seven upstream sequenced junctions, and eight of nine downstream junctions, the Cpf1 mediated clones from the reactions with T4 DNA ligase indicated faithful digestion and ligation.

[0362] Reactions 71 and 72 were transformed with Cpf1 digested plasmids that were not subjected to DNA gel purification steps. Cpf1 enzyme however was heat inactivated according to supplier's instructions before addition of T4 DNA ligase (reaction 72). Reactions 71 and 72 exhibited the same ligase-dependency.

TABLE 7
Resistant Transformant Colonies Comprising Cpf1-edited vectors

| | 55 | 56 | 59 | 60 | 67 | 68 | 71* | 72* |
|---|---|---|---|---|---|---|---|---|
| Guides M + N | yes | yes | | | | | | |
| Guides N + O | | | yes | yes | | | | |
| Guides P + O | | | | | yes | yes | yes | yes |
| T4 Ligase | No | Yes | No | Yes | No | Yes | No | Yes |
| # of transformants | 1 | 20 | 0 | 141 | 0 | 12 | 2 | 95 |
| (Kan Resistant | | | | | | | | |
| Colonies) | | | | | | | | |

*Plates 71 and 72 were transformed with digested DNA that had not undergone DNA gel purification after Cpf1 digestion.

[0363] The disclosure of PCT/US2017/042245 (WO 2018/013990 A1, claiming priority to U.S. Provisional App. No. 62/362,909) is incorporated herein in its entirety.

### Example 3: Plasmid Assembly by Restriction Enzyme Digestion and Ligation Using the MegaModular Design

[0364] This example describes the genetic editing of a modular CRISPR vector, according to the methods of the present disclosure. FIG. 15 illustrates the genetic editing of modular CRISPR plasmid 13000444591 described in this example. The plasmid backbone was first prepared by removing a “stuffer” insert DNA part from a previously constructed plasmid. The stuffer insert DNA part was removed by digesting the stuffer part's flanking cloning tags (cTAGs) D (SEQ ID NO: 68) and E (SEQ ID NO: 69) with restriction enzymes ApaI and PvuI. The resulting fragments were separated via gel electrophoresis, and the desired 8.3 kb fragment corresponding to the plasmid backbone was excised from the gel and extracted using standard silica membrane columns.

[0365] To generate the new insert for the modular CRISPR vector, a desired insert DNA part flanked by cTAG D and cTAG E, was PCR amplified using universal cTAG oligos tagD_FWD (SEQ ID NO: 75) and tagE_REV (SEQ ID NO: 76). The resulting insert contained a GFP marker gene flanked by cTAG D and cTAG E. The resulting PCR fragment was digested with the ApaI enzyme that cuts within cTAG D and the PvuI enzyme that cuts within cTAG E sequence. The digested insert DNA part was purified using standard silica membrane columns.

[0366] The purified modular CRISPR vector backbone and insert DNA part were combined into a single reaction with a ligase to generate a circular plasmid. The sequence for the resulting edited GFP-containing plasmid 13000444591 is provided in (SEQ ID NO: 77).

### Example 4: Plasmid Assembly by Yeast Homologous Recombination Using the MegaModular Design

[0367] Plasmid 13000283399 (SEQ ID NO: 85) was assembled by yeast homologous recombination of PCR fragments flanked by MegaModular tags. The desired constructs for assembly were amplified by PCR in such a way that they were flanked by specific MegaModular tags. These tags allowed for directional assembly of fragments in Saccharomyces cerevisiae as the tags themselves served as the overlapping homologous region for homologous recombination. Specifically, 5 fragments were amplified via PCR flanked by MegaModular tags as follows: tag A-Fragment 1-tag B; tag B-Fragment 2-tag C; tag C-Fragment 3-tag D; tag D-Fragment 4-tag E; and tag E-Fragment 5-tag F. These fragments, along with a linearized assembly vector containing a yeast origin of replication and a TRP auxotrophic selection marker as well as tag A at one end and tag F at the other, were transformed into S. cerevisiae. Circularized, assembled plasmids were selected by S. cerevisiae growth in media lacking tryptophan. These plasmids were recovered and amplified in Escherichia coli, and correct conformation was confirmed by sequencing.

### Example 5: CRISPRi Validation in Corynebacterium

[0368] The CRISPRi methods of the present disclosure were tested in the non-canonical species of Corynebacterium glutamicum. The components of the CRISPRi system were cloned into a single test vector encoding for a dCas9 and a guide RNA. The guide RNA in the test vector was designed to target the promoter region of a second construct that operably linked the targeted promoter to a gene encoding for a “paprika” Red Fluorescent Protein (RFP). A second control vector in which the guide RNA was a separate sequence not targeting the paprika RFP was generated.

[0369] The test and control vectors described above were transformed into both a wild type (WT) C. glutamicum strain, and a pcg2613-paprika strain, comprising the promoter-RFP construct described above as well as a WT strain, lacking the RFP construct (see experimental design in FIG. 17A). Cultures were grown at 30 degrees C. for 48 hours in media supplemented with 2% arabinose, to induce dCas9 via the pBAD promoter. The median fluorescence of live gated cells, for 7 biological replicates, was then recorded. The results of this experiment are shown on FIG. 17B. None of the WT strains exhibited any RFP fluorescence. Pcg2613 strains containing the control CRISPRi plasmids exhibited normal levels of RFP fluorescence. The test CRISPRi plasmid however, was successful at knocking down the expression of the RFP gene.

### Further Embodiments of the Invention

[0370] Other subject matter contemplated by the present disclosure is set out in the following numbered embodiments:
1. A recombinant modular CRISPR DNA construct for modulating the expression of a host cell gene, said construct comprising a CRISPR multi-clonal site, said multi-clonal site comprising:
[0371] a) at least two distinct cloning tags (cTAGs), wherein each cTAG comprises:
   [0372] i) one or more validated CRISPR landing sites, each comprising a protospacer sequence operably linked to a protospacer adjacent motif (PAM); wherein at least one of said validated CRISPR landing sites is unique within the modular CRISPR DNA construct; and
[0373] b) one or more DNA insert part(s);
   [0374] i) wherein each of said distinct cTAGs are distributed in flanking positions around each of the one or more DNA insert part(s);
      wherein the construct further comprises:
[0375] c) a first nucleic acid encoding a catalytically inactivated CRISPR enzyme;
[0376] d) a second nucleic acid encoding a guide RNA capable of recruiting the catalytically inactivated CRISPR enzyme of (c) to a DNA target site.
   1.1. The recombinant modular CRISPR DNA construct of embodiment 1, wherein the modular CRISPR DNA construct comprises a first origin of replication.
   1.2. The recombinant modular CRISPR DNA construct of any one of embodiments 1-1.1, wherein the modular CRISPR DNA construct comprises more than one origin of replication.
   1.3. The recombinant modular CRISPR DNA construct of any one of embodiments 1-1.2, wherein the modular CRISPR DNA construct comprises a first origin of replication and a second origin of replication.
   1.4. The recombinant modular CRISPR DNA construct of any one of embodiments 1.1 and 1.3, wherein the first origin of replication is capable of maintaining the plasmid in E. coli.
   1.5. The recombinant modular CRISPR DNA construct of any one of embodiments 1.1, 1.3, and 1.4, wherein the second origin of replication is capable of maintaining the plasmid in Corynebacterium glutamicum.
   1.6. The recombinant modular CRISPR DNA construct of any one of embodiments 1-1.4, wherein the first origin of replication is capable of maintaining the plasmid in E. coli, a second origin of replication is capable of maintaining the plasmid in Saccharomyces cerevisiae and a third origin of replication is capable of maintaining the plasmid in a Corynebacterium glutamicum.
   1.7. The recombinant modular CRISPR DNA construct of any one of embodiments 1-1.6, wherein the modular CRISPR DNA construct comprises an insert part that encodes for a selectable marker.
   1.8 The recombinant modular CRISPR DNA construct of any one of embodiments 1-1.7, wherein at least one origin of replication is comprised within an insert part within the CRISPR multi-clonal site.
   2. The recombinant modular CRISPR DNA construct of any one of embodiments 1-1.8, wherein the first nucleic acid is comprised within an insert part within the CRISPR multi-clonal site.
   3. The recombinant modular CRISPR DNA construct of embodiment 2, wherein the insert part comprising the first nucleic acid further comprises a selectable marker.
   4. The recombinant modular CRISPR DNA construct of any one of embodiments 1-3, wherein the second nucleic acid is comprised within an insert part within the CRISPR multi-clonal site.
   5. The recombinant modular CRISPR DNA construct of embodiment 4, wherein the insert part comprising the second nucleic acid further comprises a selectable marker.
   6. The recombinant modular CRISPR DNA construct of any one of embodiments 1-1.8, wherein the first nucleic acid and the second nucleic acid are each comprised within their own insert part within the CRISPR multi-clonal site.
   7. The recombinant modular CRISPR DNA construct of embodiment 6, wherein the insert parts comprising the first nucleic acid and the second nucleic acid each comprise a selectable marker.
   8. The recombinant modular CRISPR DNA construct of any one of embodiments 5-7, wherein the selectable marker comprised in the insert part comprising the first nucleic acid and the selectable marker comprised in the insert part comprising the second nucleic acid are different.
   9. The recombinant modular CRISPR DNA construct of any one of embodiments 1-5, wherein the first nucleic acid and the second nucleic acid are comprised within the same insert part within the CRISPR multi-clonal site.
   10. The recombinant modular CRISPR DNA construct of any one of embodiments 1-9, wherein the first nucleic acid is operably linked to a promoter.
   10.1 The recombinant modular CRISPR DNA construct of any one of embodiments 1-10, wherein the first nucleic acid is operably linked to a terminator.
   11. The recombinant modular CRISPR DNA construct of any one of embodiments 1-10.1, wherein the second nucleic acid is operably linked to a promoter.
   11.1 The recombinant modular CRISPR DNA construct of any one of embodiments 1-11, wherein the second nucleic acid is operably linked to a terminator.
   12. The recombinant modular CRISPR DNA construct of any one of embodiments 10-11.1, wherein the promoter is a heterologous promoter.
   12.1 The recombinant modular CRISPR DNA construct of any one of embodiments 10-12, wherein the promoter is a constitutive promoter.
   12.2 The recombinant modular CRISPR DNA construct of any one of embodiments 10-12, wherein the promoter is an inducible promoter.
   13. The recombinant modular CRISPR DNA construct of any one of embodiments 1-12.2, wherein the first nucleic acid encodes a catalytically inactivated CRISPR enzyme that is translationally fused to a transcriptional activation protein.
   13.1 The recombinant modular CRISPR DNA construct of any one of embodiments 1-12.2, wherein the first nucleic acid encodes a catalytically inactivated CRISPR enzyme that is translationally fused to a transcriptional inactivation protein.
   13.2 The recombinant modular CRISPR DNA construct of any one of embodiments 1-12.2, wherein the first nucleic acid encodes a catalytically inactivated CRISPR enzyme that is translationally fused to a transcriptional repressor.
   14. The recombinant modular CRISPR DNA construct of any one of embodiments 1-12.2, wherein the construct further comprises (e) a third nucleic acid encoding a transcriptional activation protein that, when expressed, is capable of attaching itself to the catalytically inactivated CRISPR enzyme.
   14.1 The recombinant modular CRISPR DNA construct of any one of embodiments 1-12.2, wherein the construct further comprises (e) a third nucleic acid encoding a transcriptional inactivation protein that, when expressed, is capable of attaching itself to the catalytically inactivated CRISPR enzyme.
   14.2 The recombinant modular CRISPR DNA construct of any one of embodiments 1-12.2, wherein the construct further comprises (e) a third nucleic acid encoding a transcriptional repressor protein that, when expressed, is capable of attaching itself to the catalytically inactivated CRISPR enzyme.
   15. The recombinant modular CRISPR DNA construct of embodiment 14, wherein the transcriptional activation protein attaches itself to the catalytically inactivated CRISPR enzyme via a linking aptamer, or through protein-protein interactions.
   15.1 The recombinant modular CRISPR DNA construct of embodiment 14.1, wherein the transcriptional inactivation protein attaches itself to the catalytically inactivated CRISPR enzyme via a linking aptamer, or through protein-protein interactions.
   15.2 The recombinant modular CRISPR DNA construct of embodiment 14.2, wherein the transcriptional repressor protein attaches itself to the catalytically inactivated CRISPR enzyme via a linking aptamer, or through protein-protein interactions.
   16. The recombinant modular CRISPR DNA construct of any one of embodiments 1-12.2, wherein the second nucleic acid encodes a guide RNA that is operably linked to an aptamer capable of attaching itself to a transcriptional activation protein.
   16.1 The recombinant modular CRISPR DNA construct of any one of embodiments 1-12.2, wherein the second nucleic acid encodes a guide RNA that is operably linked to an aptamer capable of attaching itself to a transcriptional inactivation protein.
   16.2 The recombinant modular CRISPR DNA construct of any one of embodiments 1-12.2, wherein the second nucleic acid encodes a guide RNA that is operably linked to an aptamer capable of attaching itself to a transcriptional repressor protein.
   17. The recombinant modular CRISPR DNA construct of any one of embodiments 13, 14, 15, and 16, wherein the transcriptional activation protein is selected from the group consisting of: VP16, VP64, and VP160, VPR.
   17.1 The recombinant modular CRISPR DNA construct of any one of embodiments 13.1, 14.1, 15.1, and 16.1, wherein the transcriptional inactivation protein is selected from the group consisting of: Mxi1, Tbx3, KRAB, EnR, and SID.
   17.2 The recombinant modular CRISPR DNA construct of any one of embodiments 13.2, 14.2, 15.2, and 16.2, wherein the transcriptional repressor protein is selected from the group consisting of: Mxi1, Tbx3, KRAB, EnR, and SID.
   18. The recombinant modular CRISPR DNA construct of any one of embodiments 1-17.2, wherein said modular CRISPR DNA construct is circular.
   19. The recombinant modular CRISPR DNA construct of any one of embodiments 1-17.2, wherein said modular CRISPR DNA construct is linear.
   20. The recombinant modular CRISPR DNA construct of any one of embodiments 1-17.2, wherein said modular CRISPR DNA construct is integrated into the genome of an organism.
   21. The recombinant modular CRISPR DNA construct of any one of embodiments 1-20, wherein at least one of said distinct cTAGs comprises at least two validated CRISPR landing sites.
   22. The recombinant modular CRISPR DNA construct of any one of embodiments 1-21, wherein at least one of the CRISPR landing sites is for a Cas9 endonuclease.
   23. The recombinant modular CRISPR DNA construct of any one of embodiments 1-22, wherein at least one of the CRISPR landing sites is for a Cpf1 endonuclease.
   24. The recombinant modular CRISPR DNA construct of any one of embodiments 1-23, wherein at least one of said distinct cTAGs comprises a rare (≥8 bases long) restriction endonuclease site.
   24.1 The recombinant modular CRISPR DNA construct of any one of embodiments 1-23, wherein each cTAGs comprises a rare (≥8 bases long) restriction endonuclease site
   25. The modular CRISPR DNA construct of any one of embodiments 1-24.1, wherein the catalytically inactivated CRISPR enzyme is a mutated Cas9 endonuclease.
   26. The recombinant modular CRISPR DNA construct of any one of embodiments 1-24.1, wherein the catalytically inactivated CRISPR enzyme is a mutated Cpf1 endonuclease.
   27. The modular CRISPR DNA construct of any one of embodiments 1-24.1, wherein the catalytically inactivated CRISPR enzyme is selected from amongst the dCas9 genes included in the vectors of Table 1.
   28. The modular CRISPR DNA construct of any one of embodiments 1-24.1, wherein the catalytically inactivated CRISPR enzyme is selected from the group consisting of Francisella novicida (UniProtKB-A0Q7Q2 (CPF1_FRATN)), Lachnospiraceae bacterium (UniProtKB-A0A182DWE3 (A0A182DWE3_9FIRM)), and Acidaminococcus sp. (UniProtKB-U2UMQ6 (CPF1 ACISB).
   29. The modular CRISPR DNA construct of any one of embodiments 1-24.1, wherein the catalytically inactivated CRISPR enzyme is AsCpf1 (D908A).
   30. The recombinant modular CRISPR DNA construct of any one of embodiments 1-26, wherein the recombinant modular CRISPR DNA construct encodes for more than one guide RNA capable of recruiting the catalytically inactivated CRISPR enzyme of (c) to a DNA target site.
   31. The recombinant modular CRISPR DNA construct embodiment 30, wherein at least one of the guide RNAs comprises a different sequence than another guide RNA encoded in the construct.
   32. The recombinant modular CRISPR DNA construct of embodiment 30 or 31, wherein at least one of the guide RNAs targets a different DNA target site sequence than another guide RNA encoded in the construct.
   33. The recombinant modular CRISPR DNA construct of any one of embodiments 1-32, wherein the recombinant modular CRISPR DNA construct encodes for more than one catalytically inactivated CRISPR enzyme.
   34. The recombinant modular CRISPR DNA construct of embodiment 33, wherein at least one of the catalytically inactivated CRISPR enzymes comprises a different sequence than another catalytically inactivated CRISPR enzyme encoded in the construct.
   35. The insert parts of any one of embodiments 1-34, wherein one or more of the cTAGs is selected from the group consisting of SEQ ID NO: 65-74, 78-81, and combinations thereof.
   35.5. A host cell comprising the recombinant modular CRISPR DNA construct of any one of embodiments 1-35.
   36. A high throughput method of modulating the expression of one or more host cell genes, said method comprising the step of introducing the recombinant modular CRISPR DNA construct of any one of embodiments 1-35 into the host cell; wherein the DNA target site of the guide RNA is located within the host cell genome.
   37. The high throughput method of embodiment 36, wherein at least one insert part of the recombinant modular CRISPR DNA construct is integrated into the genome of the host cell.
   38. The high throughput method of embodiment 36, wherein the recombinant modular CRISPR DNA construct remains in the host cell as extra chromosomal DNA.
   39. The high throughput method of embodiment 36, wherein the recombinant modular CRISPR DNA construct of any one of embodiments 10-12.2 is introduced into the host cell.
   40. The high throughput method of embodiment 39, further comprising the step of contacting the host cell with a compound capable of increasing expression of the inducible promoter.
   41. A recombinant modular CRISPR DNA construct for screening CRISPR enzyme variants, said construct comprising a CRISPR multi-clonal site, said multi-clonal site comprising:
[0377] a) at least two distinct cloning tags (cTAGs), wherein each cTAG comprises:
   [0378] i) one or more validated CRISPR landing sites, each comprising a protospacer sequence operably linked to a protospacer adjacent motif (PAM); wherein at least one of said validated CRISPR landing sites is unique within the modular CRISPR DNA construct; and
[0379] b) one or more DNA insert part(s);
   [0380] i) wherein each of said distinct cTAGs are distributed in flanking positions around each of the one or more DNA insert part(s);
      wherein the construct further comprises:
[0381] c) a first nucleic acid encoding a protein;
[0382] d) a second nucleic acid encoding a guide RNA capable of binding to a DNA target site.
   41.1 A recombinant modular CRISPR DNA construct for screening CRISPR enzyme variants, said construct comprising a CRISPR multi-clonal site, said multi-clonal site comprising:
[0383] a) at least two distinct cloning tags (cTAGs), wherein each cTAG comprises:
   [0384] i) one or more validated CRISPR landing sites, each comprising a protospacer sequence operably linked to a protospacer adjacent motif (PAM); wherein at least one of said validated CRISPR landing sites is unique within the modular CRISPR DNA construct; and
[0385] b) one or more DNA insert part(s);
   [0386] i) wherein each of said distinct cTAGs are distributed in flanking positions around each of the one or more DNA insert part(s);
      wherein the construct further comprises:
[0387] c) a first nucleic acid encoding a CRISPR enzyme, or an enzyme suspected of having CRISPR functionality (“putative CRISPR enzyme”);
[0388] d) a second nucleic acid encoding a guide RNA capable of binding to a DNA target site.
   41.2. A host cell comprising the recombinant modular CRISPR DNA construct of embodiments 41 or 41.1.
   42. A high throughput method of screening CRISPR enzyme variants, said method comprising the steps of:
[0389] a) introducing the recombinant modular CRISPR DNA construct of embodiment 41 or 41.1 into a host cell; wherein the DNA target site of the guide RNA is located within the host cell genome; and
[0390] b) measuring the degree of DNA cleavage occurring at the DNA target site.
   43. A recombinant modular CRISPR DNA construct for modulating the expression of a host cell gene or engineering the host cell's genome, said construct comprising a CRISPR multi-clonal site, said multi-clonal site comprising:
[0391] a) at least two distinct cloning tags (cTAGs), wherein each cTAG comprises:
   [0392] i) one or more validated CRISPR landing sites, each comprising a protospacer sequence operably linked to a protospacer adjacent motif (PAM); wherein at least one of said validated CRISPR landing sites is unique within the modular CRISPR DNA construct; and
[0393] b) one or more DNA insert part(s);
   [0394] i) wherein each of said distinct cTAGs are distributed in flanking positions around each of the one or more DNA insert part(s); and
      wherein the one or more DNA insert part(s) comprises DNA encoding for a modulator of CRISPR function.
      44. The recombinant modular CRISPR DNA construct of embodiment 43, wherein the insert part comprising the DNA encoding for a modulator of CRISPR function further comprises a selectable marker.
      45. The recombinant modular CRISPR DNA construct of embodiments 43 or 44, wherein the modulator of CRISPR function is selected from the group consisting of: an origin of replication, a selectable marker, a counterselectable marker, an anti-CRISPR protein, a promoter, a terminator, a dCas9 protein, a dCpf1 protein, a barcode, a Cas9 protein, a Cpf1 protein, a DNA donor, and a protein that facilitates multiplexed genome editing.
      46. A host cell comprising the recombinant modular CRISPR DNA construct of any one of embodiments 43-45.
      47. The host cell of embodiment 46, wherein the host cell comprises a nucleic acid molecule encoding a catalytically active CRISPR enzyme and a guide RNA capable of recruiting the catalytically active CRISPR enzyme to a DNA target site.
      48. The host cell of embodiment 46, wherein the host cell comprises a nucleic acid molecule encoding a catalytically inactivated CRISPR enzyme and a guide RNA capable of recruiting the catalytically inactivated CRISPR enzyme to a DNA target site.
      49. The host cell of embodiment 48, wherein the catalytically inactivated CRISPR enzyme is translationally fused to a transcriptional activation protein.
      49.1 The host cell of embodiment 48, wherein the catalytically inactivated CRISPR enzyme is translationally fused to a transcriptional inactivation protein.
      49.2 The host cell of embodiment 48, wherein the catalytically inactivated CRISPR enzyme is translationally fused to a transcriptional repressor protein.
      50. The host cell of embodiment 48, wherein the host cell further comprises nucleic acid molecule encoding a transcriptional activation protein that, when expressed, is capable of attaching itself to the catalytically inactivated CRISPR enzyme.
      50.1 The host cell of embodiment 48, wherein the host cell further comprises nucleic acid molecule encoding a transcriptional inactivation protein that, when expressed, is capable of attaching itself to the catalytically inactivated CRISPR enzyme.
      50.2 The host cell of embodiment 48, wherein the host cell further comprises nucleic acid molecule encoding a transcriptional repressor protein that, when expressed, is capable of attaching itself to the catalytically inactivated CRISPR enzyme.
      51. The host cell of embodiment 50, wherein the transcriptional activation protein attaches itself to the catalytically inactivated CRISPR enzyme via a linking aptamer, or through protein-protein interactions.
      51.1 The host cell of embodiment 50.1, wherein the transcriptional inactivation protein attaches itself to the catalytically inactivated CRISPR enzyme via a linking aptamer, or through protein-protein interactions.
      51.2 The host cell of embodiment 50.2, wherein the transcriptional repressor protein attaches itself to the catalytically inactivated CRISPR enzyme via a linking aptamer, or through protein-protein interactions.
      52. The host cell of embodiment 51, wherein the guide RNA is operably linked to an aptamer capable of attaching itself to a transcriptional activation protein.
      52.1 The host cell of embodiment 51.1, wherein the guide RNA is operably linked to an aptamer capable of attaching itself to a transcriptional inactivation protein.
      52.2 The host cell of embodiment 51.3, wherein the guide RNA is operably linked to an aptamer capable of attaching itself to a transcriptional repressor protein.
      53. The host cell of any one of embodiments 49, 51, and 52, wherein the transcriptional activation protein is selected from the group consisting of: VP16, VP64, and VP160, VPR.
      53.1 The host cell of any one of embodiments 49.1, 51.1, and 52.1, wherein the transcriptional inactivation protein is selected from the group consisting of: Mxi1, Tbx3, KRAB, EnR, and SID.
      53.2 The host cell of any one of embodiments 49.2, 51.2, and 52.2, wherein the transcriptional activation protein is selected from the group consisting of: Mxi1, Tbx3, KRAB, EnR, and SID.
      54. The recombinant modular CRISPR DNA construct of any one of embodiments 43-45, wherein said modular CRISPR DNA construct is circular.
      55. The recombinant modular CRISPR DNA construct of any one of embodiments 43-45, wherein said modular CRISPR DNA construct is linear.
      56. The recombinant modular CRISPR DNA construct of any one of embodiments 43-45, wherein said modular CRISPR DNA construct is integrated into the genome of an organism.
      57. The recombinant modular CRISPR DNA construct of any one of embodiments 43-45, and 54-56 wherein at least one of said distinct cTAGs comprises at least two validated CRISPR landing sites.
      58. The recombinant modular CRISPR DNA construct of embodiment embodiments 43-45, and 54-57, wherein at least one of the CRISPR landing sites is for a Cas9 endonuclease.
      59. The recombinant modular CRISPR DNA construct of any one of embodiments 43-45, and 54-58, wherein at least one of the CRISPR landing sites is for a Cpf1 endonuclease.
      60. The recombinant modular CRISPR DNA construct of any one of embodiments 43-45, and 54-59 wherein at least one of said distinct cTAGs comprises a rare (≥8 bases long) restriction endonuclease site.
      61. The host cell of any one of embodiments 47-53.2 wherein the catalytically inactivated CRISPR enzyme is a mutated Cas9 endonuclease.
      62. The host cell of any one of embodiments 48-53.2, wherein the catalytically inactivated CRISPR enzyme is a mutated Cpf1 endonuclease.
      63. The host cell of any one of embodiments 47-53.2, and 61-62 wherein the host cell comprises more than one nucleic acid guide RNA.
      64. The host cell of embodiment 63, wherein at least one of the guide RNAs comprises a different sequence than another guide RNA.
      65. The host cell of embodiment 64, wherein at least one of the guide RNAs targets a different DNA target site sequence than another guide RNA.
      66. The host cell of any one of embodiments 48-53.2, and 61-65 wherein the host cell comprises more than one catalytically inactivated CRISPR enzyme.
      67. The host cell of embodiment 66, wherein at least one of the catalytically inactivated CRISPR enzymes comprises a different sequence than another catalytically inactivated CRISPR enzyme encoded in the construct.
      68. The insert parts of any one of embodiments 43-67, wherein one or more of the cTAGs is selected from the group consisting of SEQ ID NO: 65-74, 78-81, and combinations thereof.
      69. A high throughput method of modulating the expression of one or more host cell genes, said method comprising the step of introducing the recombinant modular CRISPR DNA construct of any one of embodiments 43-45 and 54-60 into a host cell; wherein a DNA target site of a guide RNA is located within the host cell genome.
      70. The high throughput method of embodiment 69, wherein at least one insert part of the recombinant modular CRISPR DNA construct is integrated into the genome of the host cell.
      71. The high throughput method of embodiment 69 or 70, wherein the insert part regulates the function of a CRISPR protein.
      72. The high throughput method of embodiment 69 or 70, wherein the insert part regulates the function of a gRNA.
      73. The high throughput method of embodiment 69 or 70, wherein the recombinant modular CRISPR DNA construct remains in the host cell as extra chromosomal DNA.
      74. A recombinant modular CRISPR DNA construct for screening CRISPR enzyme variants, said construct comprising a CRISPR multi-clonal site, said multi-clonal site comprising:
[0395] a) at least two distinct cloning tags (cTAGs), wherein each cTAG comprises:
   [0396] i) one or more validated CRISPR landing sites, each comprising a protospacer sequence operably linked to a protospacer adjacent motif (PAM); wherein at least one of said validated CRISPR landing sites is unique within the modular CRISPR DNA construct; and
[0397] b) one or more DNA insert part(s);
   [0398] i) wherein each of said distinct cTAGs are distributed in flanking positions around each of the one or more DNA insert part(s);
      wherein the construct further comprises:
[0399] c) a first nucleic acid encoding a CRISPR enzyme, or an enzyme suspected of having CRISPR functionality (“putative CRISPR enzyme”); and
[0400] d) a second nucleic acid encoding a guide RNA capable of binding to a DNA target site.
   75. A high throughput method of screening CRISPR activity in a host cell, said method comprising the steps of:
[0401] a) introducing the recombinant modular CRISPR DNA construct of any one of embodiments 43-45, 54-60 and 74 into the host cell; wherein the DNA target site of a guide RNA is located within the host cell genome; and
[0402] b) measuring the degree of DNA cleavage occurring at the DNA target site.
   76. A high throughput method of screening CRISPRi activity in a host cell, said method comprising the steps of:
[0403] a) introducing the recombinant modular CRISPR DNA construct of any one of embodiments 43-45, 54-60 and 74 into the host cell; wherein the DNA target site of a guide RNA is located within the host cell genome; and
[0404] b) measuring the degree of transcriptional modulation occurring at the DNA target site.

### INCORPORATION BY REFERENCE

[0405] All references, articles, publications, patents, patent publications, and patent applications cited herein are incorporated by reference in their entireties for all purposes. However, mention of any reference, article, publication, patent, patent publication, and patent application cited herein is not, and should not, be taken as an acknowledgment or any form of suggestion that they constitute valid prior art or form part of the common general knowledge in any country in the world. This application incorporates by reference PCT/US2018/017573 in its entirety for all purposes.

The application's sequence listing, which the Patent Office published only in electronic form, follows.

SEQUENCE LISTING (126 sequences)

SEQ ID NO: 1 - protein, 984 aa, Campylobacter jejuni
  MISC_FEATURE (1)..(984): Cas9
MARILAFDIGISSIGWAFSENDELKDCGVRIFTKVENPKTGESLALPRRLARSARKRLARRKARLNHLKHLIANEFKLNYEDYQSFDESLAKAYKGSLISPYELRFRALNELLSKQDFARVILHIAKRRGYDDIKNSDDKEKGAILKAIKQNEEKLANYQSVGEYLYKEYFQKFKENSKEFTNVRNKKESYERCIAQSFLKDELKLIFKKQREFGFSFSKKFEEEVLSVAFYKRALKDFSHLVGNCSFFTDEKRAPKNSPLAFMFVALTRIINLLNNLKNTEGILYTKDDLNALLNEVLKNGTLTYKQTKKLLGLSDDYEFKGEKGTYFIEFKKYKEFIKALGEHNLSQDDLNEIAKDITLIKDEIKLKKALAKYDLNQNQIDSLSKLEFKDHLNISFKALKLVTPLMLEGKKYDEACNELNLKVAINEDKKDFLPAFNETYYKDEVTNPVVLRAIKEYRKVLNALLKKYGKVHKINIELAREVGKNHSQRAKIEKEQNENYKAKKDAELECEKLGLKINSKNILKLRLFKEQKEFCAYSGEKIKISDLQDEKMLEIDHIYPYSRSFDDSYMNKVLVFTKQNQEKLNQTPFEAFGNDSAKWQKIEVLAKNLPTKKQKRILDKNYKDKEQKNFKDRNLNDTRYIARLVLNYTKDYLDFLPLSDDENTKLNDTQKGSKVHVEAKSGMLTSALRHTWGFSAKDRNNHLHHAIDAVIIAYANNSIVKAFSDFKKEQESNSAELYAKKISELDYKNKRKFFEPFSGFRQKVLDKIDEIFVSKPERKKPSGALHEETFRKEEEFYQSYGGKEGVLKALELGKIRKVNGKIVKNGDMFRVDIFKHKKTNKFYAVPIYTMDFALKVLPNKAVARSKKGEIKDWILMDENYEFCFSLYKDSLILIQTKDMQEPEFVYYNAFTSSTVSLIVSKHDNKFETLSKNQKILFKNANEKEVIAKSIGIQNLKVFEKYIVSALGEVTKAEFRQREDFKK

SEQ ID NO: 2 - protein, 1056 aa, Pasteurella multocida
  MISC_FEATURE (1)..(1056): Cas9
MQTTNLSYILGLDLGIASVGWAVVEINENEDPIGLIDVGVRIFERAEVPKTGESLALSRRLARSTRRLIRRRAHRLLLAKRFLKREGILSTIDLEKGLPNQAWELRVAGLERRLSAIEWGAVLLHLIKHRGYLSKRKNESQTNNKELGALLSGVAQNHQLLQSDDYRTPAELALKKFAKEEGHIRNQRGAYTHTFNRLDLLAELNLLFAQQHQFGNPHCKEHIQQYMTELLMWQKPALSGEAILKMLGKCTHEKNEFKAAKHTYSAERFVWLTKLNNLRILEDGAERALNEEERQLLINHPYEKSKLTYAQVRKLLGLSEQAIFKHLRYSKENAESATFMELKAWHAIRKALENQGLKDTWQDLAKKPDLLDEIGTAFSLYKTDEDIQQYLTNKVPNSVINALLVSLNFDKFIELSLKSLRKILPLMEQGKRYDQACREIYGHHYGEANQKTSQLLPAIPAQEIRNPVVLRTLSQARKVINAIIRQYGSPARVHIETGRELGKSFKERREIQKQQEDNRTKRESAVQKFKELFSDFSSEPKSKDILKFRLYEQQHGKCLYSGKEINIHRLNEKGYVEIDHALPFSRTWDDSFNNKVLVLASENQNKGNQTPYEWLQGKINSERWKNFVALVLGSQCSAAKKQRLLTQVIDDNKFIDRNLNDTRYIARFLSNYIQENLLLVGKNKKNVFTPNGQITALLRSRWGLIKARENNNRHHALDAIVVACATPSMQQKITRFIRFKEVHPYKIENRYEMVDQESGEIISPHFPEPWAYFRQEVNIRVFDNHPDTVLKEMLPDRPQANHQFVQPLFVSRAPTRKMSGQGHMETIKSAKRLAEGISVLRIPLTQLKPNLLENMVNKEREPALYAGLKARLAEFNQDPAKAFATPFYKQGGQQVKAIRVEQVQKSGVLVRENNGVADNASIVRTDVFIKNNKFFLVPIYTWQVAKGILPNKAIVAHKNEDEWEEMDEGAKFKFSLFPNDLVELKTKKEYFFGYYIGLDRATGNISLKEHDGEISKGKDGVYRVGVKLALSFEKYQVDELGKNRQICRPQQRQPVR

SEQ ID NO: 3 - protein, 1368 aa, Streptococcus pyogenes [sequence omitted]

SEQ ID NO: 4 - protein, 1121 aa, Streptococcus thermophilus
  MISC_FEATURE (1)..(1121): Cas9
MSDLVLGLDIGIGSVGVGILNKVTGEIIHKNSRIFPAAQAENNLVRRTNRQGRRLARRKKHRRVRLNRLFEESGLITDFTKISINLNPYQLRVKGLTDELSNEELFIALKNMVKHRGISYLDDASDDGNSSVGDYAQIVKENSKQLETKTPGQIQLERYQTYGQLRGDFTVEKDGKKHRLINVFPTSAYRSEALRILQTQQEFNPQITDEFINRYLEILTGKRKYYHGPGNEKSRTDYGRYRTSGETLDNIFGILIGKCTFYPDEFRAAKASYTAQEFNLLNDLNNLTVPTETKKLSKEQKNQIINYVKNEKAMGPAKLFKYIAKLLSCDVADIKGYRIDKSGKAEIHTFEAYRKMKTLETLDIEQMDRETLDKLAYVLTLNTEREGIQEALEHEFADGSFSQKQVDELVQFRKANSSIFGKGWHNFSVKLMMELIPELYETSEEQMTILTRLGKQKTTSSSNKTKYIDEKLLTEEIYNPVVAKSVRQAIKIVNAAIKEYGDFDNIVIEMARETNEDDEKKAIQKIQKANKDEKDAAMLKAANQYNGKAELPHSVFHGHKQLATKIRLWHQQGERCLYTGKTISIHDLINNSNQFEVDHILPLSITFDDSLANKVLVYATANQEKGQRTPYQALDSMDDAWSFRELKAFVRESKTLSNKKKEYLLTEEDISKFDVRKKFIERNLVDTRYASRVVLNALQEHFRAHKIDTKVSVVRGQFTSQLRRHWGIEKTRDTYHHHAVDALIIAASSQLNLWKKQKNTLVSYSEDQLLDIETGELISDDEYKESVFKAPYQHFVDTLKSKEFEDSILFSYQVDSKFNRKISDATIYATRQAKVGKDKADETYVLGKIKDIYTQDGYDAFMKIYKKDKSKFLMYRHDPQTFEKVIEPILENYPNKQINEKGKEVPCNPFLKYKEEHGYIRKYSKKGNGPEIKSLKYYDSKLGNHIDITPKDSNNKVVLQSVSPWRADVYFNKTTGKYEILGLKYADLQFEKGTGTYKISQEKYNDIKKKEGVDSDSEFKFTLYKNDLLLVKDTETKEQQLFRFLSRTMPKQKHYVELKPYDKQKFEGGEALIKVLGNVANSGQCKKGLGKSNISIYKVRTDVLGNQHIIKNEGDKPKLDF

SEQ ID NO: 5 - protein, 1082 aa, Neisseria meningitides
  MISC_FEATURE (1)..(1082): Cas9
MAAFKPNPINYILGLDIGIASVGWAMVEIDEDENPICLIDLGVRVFERAEVPKTGDSLAMARRLARSVRRLTRRRAHRLLRARRLLKREGVLQAADFDENGLIKSLPNTPWQLRAAALDRKLTPLEWSAVLLHLIKHRGYLSQRKNEGETADKELGALLKGVADNAHALQTGDFRTPAELALNKFEKESGHIRNQRGDYSHTFSRKDLQAELILLFEKQKEFGNPHVSGGLKEGIETLLMTQRPALSGDAVQKMLGHCTFEPAEPKAAKNTYTAERFIWLTKLNNLRILEQGSERPLTDTERATLMDEPYRKSKLTYAQARKLLGLEDTAFFKGLRYGKDNAEASTLMEMKAYHAISRALEKEGLKDKKSPLNLSPELQDEIGTAFSLFKTDEDITGRLKDRIQPEILEALLKHISFDKFVQISLKALRRIVPLMEQGKRYDEACAEIYGDHYGKKNTEEKIYLPPIPADEIRNPVVLRALSQARKVINGVVRRYGSPARIHIETAREVGKSFKDRKEIEKRQEENRKDREKAAAKFREYFPNFVGEPKSKDILKLRLYEQQHGKCLYSGKEINLGRLNEKGYVEIDHALPFSRTWDDSFNNKVLVLGSENQNKGNQTPYEYFNGKDNSREWQEFKARVETSRFPRSKKQRILLQKFDEDGFKERNLNDTRYVNRFLCQFVADRMRLTGKGKKRVFASNGQITNLLRGFWGLRKVRAENDRHHALDAVVVACSTVAMQQKITRFVRYKEMNAFDGKTIDKETGEVLHQKTHFPQPWEFFAQEVMIRVFGKPDGKPEFEEADTPEKLRTLLAEKLSSRPEAVHEYVTPLFVSRAPNRKMSGQGHMETVKSAKRLDEGVSVLRVPLTQLKLKDLEKMVNREREPKLYEALKARLEAHKDDPAKAFAEPFYKYDKAGNRTQQVKAVRVEQVQKTGVWVRNHNGIADNATMVRVDVFEKGDKYYLVPIYSWQVAKGILPDRAVVQGKDEEDWQLIDDSFNFKFSLHPNDLVEVITKKARMFGYFASCHRGTGNINIRIHDLDHKIGKNGILEGIGVKTALSFQKYQIDELGKEIRPCRLKKRPPVR

SEQ ID NO: 6 - protein, 1345 aa, Streptococcus mutans
  MISC_FEATURE (1)..(1345): Cas9
MKKPYSIGLDIGTNSVGWAVVTDDYKVPAKKMKVLGNTDKSHIEKNLLGALLFDSGNTAEDRRLKRTARRRYTRRRNRILYLQEIFSEEMGKVDDSFFHRLEDSFLVTEDKRGERHPIFGNLEEEVKYHENFPTIYHLRQYLADNPEKVDLRLVYLALAHIIKFRGHFLIEGKFDTRNNDVQRLFQEFLAVYDNTFENSSLQEQNVQVEEILTDKISKSAKKDRVLKLFPNEKSNGRFAEFLKLIVGNQADFKKHFELEEKAPLQFSKDTYEEELEVLLAQIGDNYAELFLSAKKLYDSILLSGILTVTDVGTKAPLSASMIQRYNEHQMDLAQLKQFIRQKLSDKYNEVFSDVSKDGYAGYIDGKTNQEAFYKYLKGLLNKIEGSGYFLDKIEREDFLRKQRTFDNGSIPHQIHLQEMRAIIRRQAEFYPFLADNQDRIEKLLTFRIPYYVGPLARGKSDFAWLSRKSADKITPWNFDEIVDKESSAEAFINRMTNYDLYLPNQKVLPKHSLLYEKFTVYNELTKVKYKTEQGKTAFFDANMKQEIFDGVFKVYRKVTKDKLMDFLEKEFDEFRIVDLTGLDKENKVFNASYGTYHDLCKILDKDFLDNSKNEKILEDIVLTLTLFEDREMIRKRLENYSDLLTKEQVKKLERRHYTGWGRLSAELIHGIRNKESRKTILDYLIDDGNSNRNFMQLINDDALSFKEEIAKAQVIGETDNLNQVVSDIAGSPAIKKGILQSLKIVDELVKIMGHQPENIVVEMARENQFTNQGRRNSQQRLKGLTDSIKEFGSQILKEHPVENSQLQNDRLFLYYLQNGRDMYTGEELDIDYLSQYDIDHIIPQAFIKDNSIDNRVLTSSKENRGKSDDVPSKDVVRKMKSYWSKLLSAKLITQRKFDNLTKAERGGLTDDDKAGFIKRQLVETRQITKHVARILDERFNTETDENNKKIRQVKIVTLKSNLVSNFRKEFELYKVREINDYHHAHDAYLNAVIGKALLGVYPQLEPEFVYGDYPHFHGHKENKATAKKFFYSNIMNFFKKDDVRTDKNGEIIWKKDEHISNIKKVLSYPQVNIVKKVEEQTGGFSKESILPKGNSDKLIPRKTKKFYWDTKKYGGFDSPIVAYSILVIADIEKGKSKKLKTVKALVGVTIMEKMTFERDPVAFLERKGYRNVQEENIIKLPKYSLFKLENGRKRLLASARELQKGNEIVLPNHLGTLLYHAKNIHKVDEPKHLDYVDKHKDEFKELLDVVSNFSKKYTLAEGNLEKIKELYAQNNGEDLKELASSFINLLTFTAIGAPATFKFFDKNIDRKRYTSTTEILNATLIHQSITGLYETRIDLNKLGGD

SEQ ID NO: 7 - protein, 1345 aa, Francisella tularensis subsp. Novicida U112
  MISC_FEATURE (1)..(1345): FnCpf1; pY004
MSIYQEFVNKYSLSKTLRFELIPQGKTLENIKARGLILDDEKRAKDYKKAKQIIDKYHQFFIEEILSSVCISEDLLQNYSDVYFKLKKSDDDNLQKDFKSAKDTIKKQISEYIKDSEKFKNLFNQNLIDAKKGQESDLILWLKQSKDNGIELFKANSDITDIDEALEIIKSFKGWTTYFKGFHENRKNVYSSNDIPTSIIYRIVDDNLPKFLENKAKYESLKDKAPEAINYEQIKKDLAEELTFDIDYKTSEVNQRVFSLDEVFEIANFNNYLNQSGITKFNTIIGGKFVNGENTKRKGINEYINLYSQQINDKTLKKYKMSVLFKQILSDTESKSFVIDKLEDDSDVVTTMQSFYEQIAAFKTVEEKSIKETLSLLFDDLKAQKLDLSKIYFKNDKSLTDLSQQVFDDYSVIGTAVLEYITQQIAPKNLDNPSKKEQELIAKKTEKAKYLSLETIKLALEEFNKHRDIDKQCRFEEILANFAAIPMIFDEIAQNKDNLAQISIKYQNQGKKDLLQASAEDDVKAIKDLLDQTNNLLHKLKIFHISQSEDKANILDKDEHFYLVFEECYFELANIVPLYNKIRNYITQKPYSDEKFKLNFENSTLANGWDKNKEPDNTAILFIKDDKYYLGVMNKKNNKIFDDKAIKENKGEGYKKIVYKLLPGANKMLPKVFFSAKSIKFYNPSEDILRIRNHSTHTKNGSPQKGYEKFEFNIEDCRKFIDFYKQSISKHPEWKDFGFRFSDTQRYNSIDEFYREVENQGYKLTFENISESYIDSVVNQGKLYLFQIYNKDFSAYSKGRPNLHTLYWKALFDERNLQDVVYKLNGEAELFYRKQSIPKKITHPAKEAIANKNKDNPKKESVFEYDLIKDKRFTEDKFFFHCPITINFKSSGANKFNDEINLLLKEKANDVHILSIDRGERHLAYYTLVDGKGNIIKQDTFNIIGNDRMKTNYHDKLAAIEKDRDSARKDWKKINNIKEMKEGYLSQVVHEIAKLVIEYNAIVVFEDLNFGFKRGRFKVEKQVYQKLEKMLIEKLNYLVFKDNEFDKTGGVLRAYQLTAPFETFKKMGKQTGIIYYVPAGFTSKICPVTGFVNQLYPKYESVSKSQEFFSKFDKICYNLDKGYFEFSFDYKNFGDKAAKGKWTIASFGSRLINFRNSDKNHNWDTREVYPTKELEKLLKDYSIEYGHGECIKAAICGESDKKFFAKLTSVLNTILQMRNSKTGTELDYLISPVADVNGNFFDSRQAPKNMPQDADANGAYHIGLKGLMLLGRIKNNQEGKKLNLVIKNEEYFEFVQNRNNKRPAATKKAGQAKKKKGSYPYDVPDYAYPYDVPDYAYPYDVPDYA

SEQ ID NO: 8 - protein, 1278 aa, Lachnospiraceae bacterium MC2017
  MISC_FEATURE (1)..(1278): Lb3Cpf1; pY005
MDYGNGQFERRAPLTKTITLRLKPIGETRETIREQKLLEQDAAFRKLVETVTPIVDDCIRKIADNALCHFGTEYDFSCLGNAISKNDSKAIKKETEKVEKLLAKVLTENLPDGLRKVNDINSAAFIQDTLTSFVQDDADKRVLIQELKGKTVLMQRFLTTRITALTVWLPDRVFENFNIFIENAEKMRILLDSPLNEKIMKFDPDAEQYASLEFYGQCLSQKDIDSYNLIISGIYADDEVKNPGINEIVKEYNQQIRGDKDESPLPKLKKLHKQILMPVEKAFFVRVLSNDSDARSILEKILKDTEMLPSKIIEAMKEADAGDIAVYGSRLHELSHVIYGDHGKLSQIIYDKESKRISELMETLSPKERKESKKRLEGLEEHIRKSTYTFDELNRYAEKNVMAAYIAAVEESCAEIMRKEKDLRTLLSKEDVKIRGNRHNTLIVKNYFNAWTVFRNLIRILRRKSEAEIDSDFYDVLDDSVEVLSLTYKGENLCRSYITKKIGSDLKPEIATYGSALRPNSRWWSPGEKFNVKFHTIVRRDGRLYYFILPKGAKPVELEDMDGDIECLQMRKIPNPTIFLPKLVFKDPEAFFRDNPEADEFVFLSGMKAPVTITRETYEAYRYKLYTVGKLRDGEVSEEEYKRALLQVLTAYKEFLENRMIYADLNFGFKDLEEYKDSSEFIKQVETHNTFMCWAKVSSSQLDDLVKSGNGLLFEIWSERLESYYKYGNEKVLRGYEGVLLSILKDENLVSMRTLLNSRPMLVYRPKESSKPMVVHRDGSRVVDRFDKDGKYIPPEVHDELYRFFNNLLIKEKLGEKARKILDNKKVKVKVLESERVKWSKFYDEQFAVTFSVKKNADCLDTTKDLNAEVMEQYSESNRLILIRNTTDILYYLVLDKNGKVLKQRSLNIINDGARDVDWKERFRQVTKDRNEGYNEWDYSRTSNDLKEVYLNYALKEIAEAVIEYNAILIIEKMSNAFKDKYSFLDDVTFKGFETKLLAKLSDLHFRGIKDGEPCSFTNPLQLCQNDSNKILQDGVIFMVPNSMTRSLDPDTGFIFAINDHNIRTKKAKLNFLSKFDQLKVSSEGCLIMKYSGDSLPTHNTDNRVWNCCCNHPITNYDRETKKVEFIEEPVEELSRVLEENGIETDTELNKLNERENVPGKVVDAIYSLVLNYLRGTVSGVAGQRAVYYSPVTGKKYDISFIQAMNLNRKCDYYRIGSKERGEWTDFVAQLINKRPAATKKAGQAKKKKGSYPYDVPDYAYPYDVPDYAYPYDVPDYA

SEQ ID NO: 9 - protein, 1345 aa, Butyrivibrio proteoclasticus; identical to SEQ ID NO: 7
  MISC_FEATURE (1)..(1345): BpCpf1; pY006

SEQ ID NO: 10 - protein, 1522 aa, Peregrinibacteria bacterium GW2011_GWA_33_10
  MISC_FEATURE (1)..(1522): PeCpf1; pY007
MSNFFKNFTNLYELSKTLRFELKPVGDTLTNMKDHLEYDEKLQTFLKDQNIDDAYQALKPQFDEIHEEFITDSLESKKAKEIDFSEYLDLFQEKKELNDSEKKLRNKIGETFNKAGEKWKKEKYPQYEWKKGSKIANGADILSCQDMLQFIKYKNPEDEKIKNYIDDTLKGFFTYFGGFNQNRANYYETKKEASTAVATRIVHENLPKFCDNVIQFKHIIKRKKDGTVEKTERKTEYLNAYQYLKNNNKITQIKDAETEKMIESTPIAEKIFDVYYFSSCLSQKQIEEYNRIIGHYNLLINLYNQAKRSEGKHLSANEKKYKDLPKFKTLYKQIGCGKKKDLFYTIKCDTEEEANKSRNEGKESHSVEEIINKAQEAINKYFKSNNDCENINTVPDFINYILTKENYEGVYWSKAAMNTISDKYFANYHDLQDRLKEAKVFQKADKKSEDDIKIPEAIELSGLFGVLDSLADWQTTLFKSSILSNEDKLKIITDSQTPSEALLKMIFNDIEKNMESFLKETNDIITLKKYKGNKEGTEKIKQWFDYTLAINRMLKYFLVKENKIKGNSLDTNISEALKTLIYSDDAEWFKWYDALRNYLTQKPQDEAKENKLKLNFDNPSLAGGWDVNKECSNFCVILKDKNEKKYLAIMKKGENTLFQKEWTEGRGKNLTKKSNPLFEINNCEILSKMEYDFWADVSKMIPKCSTQLKAVVNHFKQSDNEFIFPIGYKVTSGEKFREECKISKQDFELNNKVFNKNELSVTAMRYDLSSTQEKQYIKAFQKEYWELLFKQEKRDTKLTNNEIFNEWINFCNKKYSELLSWERKYKDALTNWINFCKYFLSKYPKTTLFNYSFKESENYNSLDEFYRDVDICSYKLNINTTINKSILDRLVEEGKLYLFEIKNQDSNDGKSIGHKNNLHTIYWNAIFENFDNRPKLNGEAEIFYRKAISKDKLGIVKGKKTKNGTEIIKNYRFSKEKFILHVPITLNFCSNNEYVNDIVNTKFYNFSNLHFLGIDRGEKHLAYYSLVNKNGEIVDQGTLNLPFTDKDGNQRSIKKEKYFYNKQEDKWEAKEVDCWNYNDLLDAMASNRDMARKNWQRIGTIKEAKNGYVSLVIRKIADLAVNNERPAFIVLEDLNTGFKRSRQKIDKSVYQKFELALAKKLNFLVDKNAKRDEIGSPTKALQLTPPVNNYGDIENKKQAGIMLYTRANYTSQTDPATGWRKTIYLKAGPEETTYKKDGKIKNKSVKDQIIETFTDIGFDGKDYYFEYDKGEFVDEKTGEIKPKKWRLYSGENGKSLDRFRGEREKDKYEWKIDKIDIVKILDDLFVNFDKNISLLKQLKEGVELTRNNEHGTGESLRFAINLIQQIRNTGNNERDNDFILSPVRDENGKHFDSREYWDKETKGEKISMPSSGDANGAFNIARKGIIMNAHILANSDSKDLSLFVSDEEWDLHLNNKTEWKKQLNIFSSRKAMAKRKKKRPAATKKAGQAKKKKGSYPYDVPDYAYPYDVPDYAYPYDVPDYA

SEQ ID NO: 11 - protein, 1397 aa, Parcubacteria bacterium GWC2011_GWC2_44_17
  MISC_FEATURE (1)..(1397): PbCpf1; pY008
MENIFDQFIGKYSLSKTLRFELKPVGKTEDFLKINKVFEKDQTIDDSYNQAKFYFDSLHQKFIDAALASDKTSELSFQNFADVLEKQNKIILDKKREMGALRKRDKNAVGIDRLQKEINDAEDIIQKEKEKIYKDVRTLFDNEAESWKTYYQEREVDGKKITFSKADLKQKGADFLTAAGILKVLKYEFPEEKEKEFQAKNQPSLFVEEKENPGQKRYIFDSFDKFAGYLTKFQQTKKNLYAADGTSTAVATRIADNFIIFHQNTKVFRDKYKNNHTDLGFDEENIFEIERYKNCLLQREIEHIKNENSYNKIIGRINKKIKEYRDQKAKDTKLTKSDFPFFKNLDKQILGEVEKEKQLIEKTREKTEEDVLIERFKEFIENNEERFTAAKKLMNAFCNGEFESEYEGIYLKNKAINTISRRWFVSDRDFELKLPQQKSKNKSEKNEPKVKKFISIAEIKNAVEELDGDIFKAVFYDKKIIAQGGSKLEQFLVIWKYEFEYLFRDIERENGEKLLGYDSCLKIAKQLGIFPQEKEAREKATAVIKNYADAGLGIFQMMKYFSLDDKDRKNTPGQLSTNFYAEYDGYYKDFEFIKYYNEFRNFITKKPFDEDKIKLNFENGALLKGWDENKEYDFMGVILKKEGRLYLGIMHKNHRKLFQSMGNAKGDNANRYQKMIYKQIADASKDVPRLLLTSKKAMEKFKPSQEILRIKKEKTFKRESKNFSLRDLHALIEYYRNCIPQYSNWSFYDFQFQDTGKYQNIKEFTDDVQKYGYKISFRDIDDEYINQALNEGKMYLFEVVNKDIYNTKNGSKNLHTLYFEHILSAENLNDPVFKLSGMAEIFQRQPSVNEREKITTQKNQCILDKGDRAYKYRRYTEKKIMFHMSLVLNTGKGEIKQVQFNKIINQRISSSDNEMRVNVIGIDRGEKNLLYYSVVKQNGEIIEQASLNEINGVNYRDKLIEREKERLKNRQSWKPVVKIKDLKKGYISHVIHKICQLIEKYSAIVVLEDLNMRFKQIRGGIERSVYQQFEKALIDKLGYLVFKDNRDLRAPGGVLNGYQLSAPFVSFEKMRKQTGILFYTQAEYTSKTDPITGFRKNVYISNSASLDKIKEAVKKFDAIGWDGKEQSYFFKYNPYNLADEKYKNSTVSKEWAIFASAPRIRRQKGEDGYWKYDRVKVNEEFEKLLKVWNFVNPKATDIKQEIIKKEKAGDLQGEKELDGRLRNFWHSFIYLFNLVLELRNSFSLQIKIKAGEVIAVDEGVDFIASPVKPFFTTPNPYIPSNLCWLAVENADANGAYNIARKGVMILKKIREHAKKDPEFKKLPNLFISNAEWDEAARDWGKYAGTTALNLDHKRPAATKKAGQAKKKKGSYPYDVPDYAYPYDVPDYAYPYDVPDYA

SEQ ID NO: 12 - protein, 1295 aa, Smithella sp. SC_K08D17
  MISC_FEATURE (1)..(1295): SsCpf1; pY009
MQTLFENFTNQYPVSKTLRFELIPQGKTKDFIEQKGLLKKDEDRAEKYKKVKNIIDEYHKDFIEKSLNGLKLDGLEKYKTLYLKQEKDDKDKKAFDKEKENLRKQIANAFRNNEKFKTLFAKELIKNDLMSFACEEDKKNVKEFEAFTTYFTGFHQNRANMYVADEKRTAIASRLIHENLPKFIDNIKIFEKMKKEAPELLSPFNQTLKDMKDVIKGTTLEEIFSLDYFNKTLTQSGIDIYNSVIGGRTPEEGKTKIKGLNEYINTDFNQKQTDKKKRQPKFKQLYKQILSDRQSLSFIAEAFKNDTEILEAIEKFYVNELLHFSNEGKSTNVLDAIKNAVSNLESFNLTKMYFRSGASLTDVSRKVFGEWSIINRALDNYYATTYPIKPREKSEKYEERKEKWLKQDFNVSLIQTAIDEYDNETVKGKNSGKVIADYFAKFCDDKETDLIQKVNEGYIAVKDLLNTPCPENEKLGSNKDQVKQIKAFMDSIMDIMHFVRPLSLKDTDKEKDETFYSLFTPLYDHLTQTIALYNKVRNYLTQKPYSTEKIKLNFENSTLLGGWDLNKETDNTAIILRKDNLYYLGIMDKRHNRIFRNVPKADKKDFCYEKMVYKLLPGANKMLPKVFFSQSRIQEFTPSAKLLENYANETHKKGDNFNLNHCHKLIDFFKDSINKHEDWKNFDFRFSATSTYADLSGFYHEVEHQGYKISFQSVADSFIDDLVNEGKLYLFQIYNKDFSPFSKGKPNLHTLYWKMLFDENNLKDVVYKLNGEAEVFYRKKSIAEKNTTIHKANESIINKNPDNPKATSTFNYDIVKDKRYTIDKFQFHIPITMNFKAEGIFNMNQRVNQFLKANPDINIIGIDRGERHLLYYALINQKGKILKQDTLNVIANEKQKVDYHNLLDKKEGDRATARQEWGVIETIKELKEGYLSQVIHKLTDLMIENNAIIVMEDLNFGFKRGRQKVEKQVYQKFEKMLIDKLNYLVDKNKKANELGGLLNAFQLANKFESFQKMGKQNGFIFYVPAWNTSKTDPATGFIDFLKPRYENLNQAKDFFEKFDSIRLNSKADYFEFAFDFKNFTEKADGGRTKWTVCTTNEDRYAWNRALNNNRGSQEKYDITAELKSLFDGKVDYKSGKDLKQQIASQESADFFKALMKNLSITLSLRHNNGEKGDNEQDYILSPVADSKGRFFDSRKADDDMPKNADANGAYHIALKGLWCLEQISKTDDLKKVKLAISNKEWLEFVQTLKGKRPAATKKAGQAKKKKGSYPYDVPDYAYPYDVPDYAYPYDVPDYA

SEQ ID NO: 13 - protein, 1352 aa, Acidaminococcus sp. BV3L6
  MISC_FEATURE (1)..(1352): AsCpf1; pY010
MTQFEGFTNLYQVSKTLRFELIPQGKTLKHIQEQGFIEEDKARNDHYKELKPIIDRIYKTYADQCLQLVQLDWENLSAAIDSYRKEKTEETRNALIEEQATYRNAIHDYFIGRTDNLTDAINKRHAEIYKGLFKAELFNGKVLKQLGTVTTTEHENALLRSFDKFTTYFSGFYENRKNVFSAEDISTAIPHRIVQDNFPKFKENCHIFTRLITAVPSLREHFENVKKAIGIFVSTSIEEVFSFPFYNQLLTQTQIDLYNQLLGGISREAGTEKIKGLNEVLNLAIQKNDETAHIIASLPHRFIPLFKQILSDRNTLSFILEEFKSDEEVIQSFCKYKTLLRNENVLETAEALFNELNSIDLTHIFISHKKLETISSALCDHWDTLRNALYERRISELTGKITKSAKEKVQRSLKHEDINLQEIISAAGKELSEAFKQKTSEILSHAHAALDQPLPTTLKKQEEKEILKSQLDSLLGLYHLLDWFAVDESNEVDPEFSARLTGIKLEMEPSLSFYNKARNYATKKPYSVEKFKLNFQMPTLASGWDVNKEKNNGAILFVKNGLYYLGIMPKQKGRYKALSFEPTEKTSEGFDKMYYDYFPDAAKMIPKCSTQLKAVTAHFQTHTTPILLSNNFIEPLEITKEIYDLNNPEKEPKKFQTAYAKKTGDQKGYREALCKWIDFTRDFLSKYTKTTSIDLSSLRPSSQYKDLGEYYAELNPLLYHISFQRIAEKEIMDAVETGKLYLFQIYNKDFAKGHHGKPNLHTLYWTGLFSPENLAKTSIKLNGQAELFYRPKSRMKRMAHRLGEKMLNKKLKDQKTPIPDTLYQELYDYVNHRLSHDLSDEARALLPNVITKEVSHEIIKDRRFTSDKFFFHVPITLNYQAANSPSKFNQRVNAYLKEHPETPIIGIDRGERNLIYITVIDSTGKILEQRSLNTIQQFDYQKKLDNREKERVAARQAWSVVGTIKDLKQGYLSQVIHEIVDLMIHYQAVVVLENLNFGFKSKRTGIAEKAVYQQFEKMLIDKLNCLVLKDYPAEKVGGVLNPYQLTDQFTSFAKMGTQSGFLFYVPAPYTSKIDPLTGFVDPFVWKTIKNHESRKHFLEGFDFLHYDVKTGDFILHFKMNRNLSFQRGLPGFMPAWDIVFEKNETQFDAKGTPFIAGKRIVPVIENHRFTGRYRDLYPANELIALLEEKGIVFRDGSNILPKLLENDDSHAIDTMVALIRSVLQMRNSNAATGEDYINSPVRDLNGVCFDSRFQNPEWPMDADANGAYHIALKGQLLLNHLKESKDLKLQNGISNQDWLAYIQELRNKRPAATKKAGQAKKKKGSYPYDVPDYAYPYDVPDYAYPYDVPDYA

SEQ ID NO: 14 - protein, 1251 aa, Lachnospiraceae bacterium MA2020
  MISC_FEATURE (1)..(1251): Lb2Cpf1; pY011
MYYESLTKQYPVSKTIRNELIPIGKTLDNIRQNNILESDVKRKQNYEHVKGILDEYHKQLINEALDNCTLPSLKIAAEIYLKNQKEVSDREDFNKTQDLLRKEVVEKLKAHENFTKIGKKDILDLLEKLPSISEDDYNALESFRNFYTYFTSYNKVRENLYSDKEKSSTVAYRLINENFPKFLDNVKSYRFVKTAGILADGLGEEEQDSLFIVETFNKTLTQDGIDTYNSQVGKINSSINLYNQKNQKANGFRKIPKMKMLYKQILSDREESFIDEFQSDEVLIDNVESYGSVLIESLKSSKVSAFFDALRESKGKNVYVKNDLAKTAMSNIVFENWRTFDDLLNQEYDLANENKKKDDKYFEKRQKELKKNKSYSLEHLCNLSEDSCNLIENYIHQISDDIENIIINNETFLRIVINEHDRSRKLAKNRKAVKAIKDFLDSIKVLERELKLINSSGQELEKDLIVYSAHEELLVELKQVDSLYNMTRNYLTKKPFSTEKVKLNFNRSTLLNGWDRNKETDNLGVLLLKDGKYYLGIMNTSANKAFVNPPVAKTEKVFKKVDYKLLPVPNQMLPKVFFAKSNIDFYNPSSEIYSNYKKGTHKKGNMFSLEDCHNLIDFFKESISKHEDWSKFGFKFSDTASYNDISEFYREVEKQGYKLTYTDIDETYINDLIERNELYLFQIYNKDFSMYSKGKLNLHTLYFMMLFDQRNIDDVVYKLNGEAEVFYRPASISEDELIIHKAGEEIKNKNPNRARTKETSTFSYDIVKDKRYSKDKFTLHIPITMNFGVDEVKRFNDAVNSAIRIDENVNVIGIDRGERNLLYVVVIDSKGNILEQISLNSIINKEYDIETDYHALLDEREGGRDKARKDWNTVENIRDLKAGYLSQVVNVVAKLVLKYNAIICLEDLNFGFKRGRQKVEKQVYQKFEKMLIDKLNYLVIDKSREQTSPKELGGALNALQLTSKFKSFKELGKQSGVIYYVPAYLTSKIDPTTGFANLFYMKCENVEKSKRFFDGFDFIRFNALENVFEFGFDYRSFTQRACGINSKWTVCTNGERIIKYRNPDKNNMFDEKVVVVTDEMKNLFEQYKIPYEDGRNVKDMIISNEEAEFYRRLYRLLQQTLQMRNSTSDGTRDYIISPVKNKREAYFNSELSDGSVPKDADANGAYNIARKGLWVLEQIRQKSEGEKINLAMTNAEWLEYAQTHLLKRPAATKKAGQAKKKKGSYPYDVPDYAYPYDVPDYAYPYDVPDYA

SEQ ID NO: 15 - protein, 1283 aa, Candidatus Methanoplasma termitum
  MISC_FEATURE (1)..(1283): CMtCpf1; pY012
MNNYDEFTKLYPIQKTIRFELKPQGRTMEHLETFNFFEEDRDRAEKYKILKEAIDEYHKKFIDEHLTNMSLDWNSLKQISEKYYKSREEKDKKVFLSEQKRMRQEIVSEFKKDDRFKDLFSKKLFSELLKEEIYKKGNHQEIDALKSFDKFSGYFIGLHENRKNMYSDGDEITAISNRIVNENFPKFLDNLQKYQEARKKYPEWIIKAESALVAHNIKMDEVFSLEYFNKVLNQEGIQRYNLALGGYVTKSGEKMMGLNDALNLAHQSEKSSKGRIHMTPLFKQILSEKESFSYIPDVFTEDSQLLPSIGGFFAQIENDKDGNIFDRALELISSYAEYDTERIYIRQADINRVSNVIFGEWGTLGGLMREYKADSINDINLERTCKKVDKWLDSKEFALSDVLEAIKRTGNNDAFNEYISKMRTAREKIDAARKEMKFISEKISGDEESIHIIKTLLDSVQQFLHFFNLFKARQDIPLDGAFYAEFDEVHSKLFAIVPLYNKVRNYLTKNNLNTKKIKLNFKNPTLANGWDQNKVYDYASLIFLRDGNYYLGIINPKRKKNIKFEQGSGNGPFYRKMVYKQIPGPNKNLPRVFLTSTKGKKEYKPSKEIIEGYEADKHIRGDKFDLDFCHKLIDFFKESIEKHKDWSKFNFYFSPTESYGDISEFYLDVEKQGYRMHFENISAETIDEYVEKGDLFLFQIYNKDFVKAATGKKDMHTIYWNAAFSPENLQDVVVKLNGEAELFYRDKSDIKEIVHREGEILVNRTYNGRTPVPDKIHKKLTDYHNGRTKDLGEAKEYLDKVRYFKAHYDITKDRRYLNDKIYFHVPLTLNFKANGKKNLNKMVIEKFLSDEKAHIIGIDRGERNLLYYSIIDRSGKIIDQQSLNVIDGFDYREKLNQREIEMKDARQSWNAIGKIKDLKEGYLSKAVHEITKMAIQYNAIVVMEELNYGFKRGRFKVEKQIYQKFENMLIDKMNYLVFKDAPDESPGGVLNAYQLTNPLESFAKLGKQTGILFYVPAAYTSKIDPTTGFVNLFNTSSKTNAQERKEFLQKFESISYSAKDGGIFAFAFDYRKFGTSKTDHKNVWTAYTNGERMRYIKEKKRNELFDPSKEIKEALTSSGIKYDGGQNILPDILRSNNNGLIYTMYSSFIAAIQMRVYDGKEDYIISPIKNSKGEFFRTDPKRRELPIDADANGAYNIALRGELTMRAIAEKFDPDSEKMAKLELKHKDWFEFMQTRGDKRPAATKKAGQAKKKKGSYPYDVPDYAYPYDVPDYAYPYDVPDYA

SEQ ID NO: 16 - protein, 1327 aa, Eubacterium eligens
  MISC_FEATURE (1)..(1327): EeCpf1; pY013
MNGNRSIVYREFVGVIPVAKTLRNELRPVGHTQEHIIQNGLIQEDELRQEKSTELKNIMDDYYREYIDKSLSGVTDLDFTLLFELMNLVQSSPSKDNKKALEKEQSKMREQICTHLQSDSNYKNIFNAKLLKEILPDFIKNYNQYDVKDKAGKLETLALFNGFSTYFTDFFEKRKNVFTKEAVSTSIAYRIVHENSLIFLANMTSYKKISEKALDEIEVIEKNNQDKMGDWELNQIFNPDFYNMVLIQSGIDFYNEICGVVNAHMNLYCQQTKNNYNLFKMRKLHKQILAYTSTSFEVPKMFEDDMSVYNAVNAFIDETEKGNIIGKLKDIVNKYDELDEKRIYISKDFYETLSCFMSGNWNLITGCVENFYDENIHAKGKSKEEKVKKAVKEDKYKSINDVNDLVEKYIDEKERNEFKNSNAKQYIREISNIITDTETAHLEYDDHISLIESEEKADEMKKRLDMYMNMYHWAKAFIVDEVLDRDEMFYSDIDDIYNILENIVPLYNRVRNYVTQKPYNSKKIKLNFQSPTLANGWSQSKEFDNNAIILIRDNKYYLAIFNAKNKPDKKIIQGNSDKKNDNDYKKMVYNLLPGANKMLPKVFLSKKGIETFKPSDYIISGYNAHKHIKTSENFDISFCRDLIDYFKNSIEKHAEWRKYEFKFSATDSYSDISEFYREVEMQGYRIDWTYISEADINKLDEEGKIYLFQIYNKDFAENSTGKENLHTMYFKNIFSEENLKDIIIKLNGQAELFYRRASVKNPVKHKKDSVLVNKTYKNQLDNGDVVRIPIPDDIYNEIYKMYNGYIKESDLSEAAKEYLDKVEVRTAQKDIVKDYRYTVDKYFIHTPITINYKVTARNNVNDMVVKYIAQNDDIHVIGIDRGERNLIYISVIDSHGNIVKQKSYNILNNYDYKKKLVEKEKTREYARKNWKSIGNIKELKEGYISGVVHEIAMLIVEYNAIIAMEDLNYGFKRGRFKVERQVYQKFESMLINKLNYFASKEKSVDEPGGLLKGYQLTYVPDNIKNLGKQCGVIFYVPAAFTSKIDPSTGFISAFNFKSISTNASRKQFFMQFDEIRYCAEKDMFSFGFDYNNFDTYNITMGKTQWTVYTNGERLQSEFNNARRTGKTKSINLTETIKLLLEDNEINYADGHDIRIDMEKMDEDKKSEFFAQLLSLYKLTVQMRNSYTEAEEQENGISYDKIISPVINDEGEFFDSDNYKESDDKECKMPKDADANGAYCIALKGLYEVLKIKSEWTEDGFDRNCLKLPHAEWLDFIQNKRYEKRPAATKKAGQAKKKKGSYPYDVPDYAYPYDVPDYAYPYDVPDYA

SEQ ID NO: 17 - protein, 1418 aa, Moraxella bovoculi 237
  MISC_FEATURE (1)..(1418): MbCpf1; pY014
MLFQDFTHLYPLSKTVRFELKPIDRTLEHIHAKNFLSQDETMADMHQKVKVILDDYHRDFIADMMGEVKLTKLAEFYDVYLKFRKNPKDDELQKQLKDLQAVLRKEIVKPIGNGGKYKAGYDRLFGAKLFKDGKELGDLAKFVIAQEGESSPKLAHLAHFEKFSTYFTGFHDNRKNMYSDEDKHTAIAYRLIHENLPRFIDNLQILTTIKQKHSALYDQIINELTASGLDVSLASHLDGYHKLLTQEGITAYNTLLGGISGEAGSPKIQGINELINSHHNQHCHKSERIAKLRPLHKQILSDGMSVSFLPSKFADDSEMCQAVNEFYRHYADVFAKVQSLFDGFDDHQKDGIYVEHKNLNELSKQAFGDFALLGRVLDGYYVDVVNPEFNERFAKAKTDNAKAKLTKEKDKFIKGVHSLASLEQAIEHYTARHDDESVQAGKLGQYFKHGLAGVDNPIQKIHNNHSTIKGFLERERPAGERALPKIKSGKNPEMTQLRQLKELLDNALNVAHFAKLLTTKTTLDNQDGNFYGEFGVLYDELAKIPTLYNKVRDYLSQKPFSTEKYKLNFGNPTLLNGWDLNKEKDNFGVILQKDGCYYLALLDKAHKKVFDNAPNTGKSIYQKMIYKYLEVRKQFPKVFFSKEAIAINYHPSKELVEIKDKGRQRSDDERLKLYRFILECLKIHPKYDKKFEGAIGDIQLFKKDKKGREVPISEKDLFDKINGIFSSKPKLEMEDFFIGEFKRYNPSQDLVDQYNIYKKIDSNDNRKKENFYNNHPKFKKDLVRYYYESMCKHEEWEESFEFSKKLQDIGCYVDVNELFTEIETRRLNYKISFCNINADYIDELVEQGQLYLFQIYNKDFSPKAHGKPNLHTLYFKALFSEDNLADPIYKLNGEAQIFYRKASLDMNETTIHRAGEVLENKNPDNPKKRQFVYDIIKDKRYTQDKFMLHVPITMNFGVQGMTIKEFNKKVNQSIQQYDEVNVIGIDRGERHLLYLTVINSKGEILEQCSLNDITTASANGTQMTTPYHKILDKREIERLNARVGWGEIETIKELKSGYLSHVVHQISQLMLKYNAIVVLEDLNFGFKRGRFKVEKQIYQNFENALIKKLNHLVLKDKADDEIGSYKNALQLTNNFTDLKSIGKQTGFLFYVPAWNTSKIDPETGFVDLLKPRYENIAQSQAFFGKFDKICYNADKDYFEFHIDYAKFTDKAKNSRQIWTICSHGDKRYVYDKTANQNKGAAKGINVNDELKSLFARHHINEKQPNLVMDICQNNDKEFHKSLMYLLKTLLALRYSNASSDEDFILSPVANDEGVFFNSALADDTQPQNADANGAYHIALKGLWLLNELKNSDDLNKVKLAIDNQTWLNFAQNRKRPAATKKAGQAKKKKGSYPYDVPDYAYPYDVPDYAYPYDVPDYA

SEQ ID NO: 18 - protein, 1308 aa, Leptospira inadai
  MISC_FEATURE (1)..(1308): LiCpf1; pY015
MEDYSGFVNIYSIQKTLRFELKPVGKTLEHIEKKGFLKKDKIRAEDYKAVKKIIDKYHRAYIEEVFDSVLHQKKKKDKTRFSTQFIKEIKEFSELYYKTEKNIPDKERLEALSEKLRKMLVGAFKGEFSEEVAEKYKNLFSKELIRNEIEKFCETDEERKQVSNFKSFTTYFTGFHSNRQNIYSDEKKSTAIGYRIIHQNLPKFLDNLKIIESIQRRFKDFPWSDLKKNLKKIDKNIKLTEYFSIDGFVNVLNQKGIDAYNTILGGKSEESGEKIQGLNEYINLYRQKNNIDRKNLPNVKILFKQILGDRETKSFIPEAFPDDQSVLNSITEFAKYLKLDKKKKSIIAELKKFLSSFNRYELDGIYLANDNSLASISTFLFDDWSFIKKSVSFKYDESVGDPKKKIKSPLKYEKEKEKWLKQKYYTISFLNDAIESYSKSQDEKRVKIRLEAYFAEFKSKDDAKKQFDLLERIEEAYAIVEPLLGAEYPRDRNLKADKKEVGKIKDFLDSIKSLQFFLKPLLSAEIFDEKDLGFYNQLEGYYEEIDSIGHLYNKVRNYLTGKIYSKEKFKLNFENSTLLKGWDENREVANLCVIFREDQKYYLGVMDKENNTILSDIPKVKPNELFYEKMVYKLIPTPHMQLPRIIFSSDNLSIYNPSKSILKIREAKSFKEGKNFKLKDCHKFIDFYKESISKNEDWSRFDFKFSKTSSYENISEFYREVERQGYNLDFKKVSKFYIDSLVEDGKLYLFQIYNKDFSIFSKGKPNLHTIYFRSLFSKENLKDVCLKLNGEAEMFFRKKSINYDEKKKREGHHPELFEKLKYPILKDKRYSEDKFQFHLPISLNFKSKERLNFNLKVNEFLKRNKDINIIGIDRGERNLLYLVMINQKGEILKQTLLDSMQSGKGRPEINYKEKLQEKEIERDKARKSWGTVENIKELKEGYLSIVIHQISKLMVENNAIVVLEDLNIGFKRGRQKVERQVYQKFEKMLIDKLNFLVFKENKPTEPGGVLKAYQLTDEFQSFEKLSKQTGFLFYVPSWNTSKIDPRTGFIDFLHPAYENIEKAKQWINKFDSIRFNSKMDWFEFTADTRKFSENLMLGKNRVWVICTTNVERYFTSKTANSSIQYNSIQITEKLKELFVDIPFSNGQDLKPEILRKNDAVFFKSLLFYIKTTLSLRQNNGKKGEEEKDFILSPVVDSKGRFFNSLEASDDEPKDADANGAYHIALKGLMNLLVLNETKEENLSRPKWKIKNKDWLEFVWERNRKRPAATKKAGQAKKKKGSYPYDVPDYAYPYDVPDYAYPYDVPDYA

SEQ ID NO: 19 - protein, 1272 aa, Lachnospiraceae bacterium ND2006
  MISC_FEATURE (1)..(1272): LbCpf1; pY016
SKLEKFTNCYSLSKTLRFKAIPVGKTQENIDNKRLLVEDEKRAEDYKGVKKLLDRYYLSFINDVLHSIKLKNLNNYISLFRKKTRTEKENKELENLEINLRKEIAKAFKGNEGYKSLFKKDIIETILPEFLDDKDEIALVNSFNGFTTAFTGFFDNRENMFSEEAKSTSIAFRCINENLTRYISNMDIFEKVDAIFDKHEVQEIKEKILNSDYDVEDFFEGEFFNFVLTQEGIDVYNAIIGGFVTESGEKIKGLNEYINLYNQKTKQKLPKFKPLYKQVLSDRESLSFYGEGYTSDEEVLEVFRNTLNKNSEIFSSIKKLEKLFKNFDEYSSAGIFVKNGPAISTISKDIFGEWNVIRDKWNAEYDDIHLKKKAVVTEKYEDDRRKSFKKIGSFSLEQLQEYADADLSVVEKLKEIIIQKVDEIYKVYGSSEKLFDADFVLEKSLKKNDAVVAIMKDLLDSVKSFENYIKAFFGEGKETNRDESFYGDFVLAYDILLKVDHIYDAIRNYVTQKPYSKDKFKLYFQNPQFMGGWDKDKETDYRATILRYGSKYYLAIMDKKYAKCLQKIDKDDVNGNYEKINYKLLPGPNKMLPKVFFSKKWMAYYNPSEDIQKIYKNGTFKKGDMFNLNDCHKLIDFFKDSISRYPKWSNAYDFNFSETEKYKDIAGFYREVEEQGYKVSFESASKKEVDKLVEEGKLYMFQIYNKDFSDKSHGTPNLHTMYFKLLFDENNHGQIRLSGGAELFMRRASLKKEELVVHPANSPIANKNPDNPKKTTTLSYDVYKDKRFSEDQYELHIPIAINKCPKNIFKINTEVRVLLKHDDNPYVIGIDRGERNLLYIVVVDGKGNIVEQYSLNEIINNFNGIRIKTDYHSLLDKKEKERFEARQNWTSIENIKELKAGYISQVVHKICELVEKYDAVIALEDLNSGFKNSRVKVEKQVYQKFEKMLIDKLNYMVDKKSNPCATGGALKGYQITNKFESFKSMSTQNGFIFYIPAWLTSKIDPSTGFVNLLKTKYTSIADSKKFISSFDRIMYVPEEDLFEFALDYKNFSRTDADYIKKWKLYSYGNRIRIFRNPKKNNVFDWEEVCLTSAYKELFNKYGINYQQGDIRALLCEQSDKAFYSSFMALMSLMLQMRNSITGRTDVDFLISPVKNSDGIFYDSRNYEAQENAILPKNADANGAYNIARKVLWAIGQFKKAEDEKLDKVKIAISNKEWLEYAQTSVKHKRPAATKKAGQAKKKKGSYPYDVPDYAYPYDVPDYAYPYDVPDYA

SEQ ID NO: 20 - protein, 1305 aa, Porphyromonas crevioricanis
  MISC_FEATURE (1)..(1305): PcCpf1; pY017
MDSLKDFTNLYPVSKTLRFELKPVGKTLENIEKAGILKEDEHRAESYRRVKKIIDTYHKVFIDSSLENMAKMGIENEIKAMLQSFCELYKKDHRTEGEDKALDKIRAVLRGLIVGAFTGVCGRRENTVQNEKYESLFKEKLIKEILPDFVLSTEAESLPFSVEEATRSLKEFDSFTSYFAGFYENRKNIYSTKPQSTAIAYRLIHENLPKFIDNILVFQKIKEPIAKELEHIRADFSAGGYIKKDERLEDIFSLNYYIHVLSQAGIEKYNALIGKIVTEGDGEMKGLNEHINLYNQQRGREDRLPLFRPLYKQILSDREQLSYLPESFEKDEELLRALKEFYDHIAEDILGRTQQLMTSISEYDLSRIYVRNDSQLTDISKKMLGDWNAIYMARERAYDHEQAPKRITAKYERDRIKALKGEESISLANLNSCIAFLDNVRDCRVDTYLSTLGQKEGPHGLSNLVENVFASYHEAEQLLSFPYPEENNLIQDKDNVVLIKNLLDNISDLQRFLKPLWGMGDEPDKDERFYGEYNYIRGALDQVIPLYNKVRNYLTRKPYSTRKVKLNFGNSQLLSGWDRNKEKDNSCVILRKGQNFYLAIMNNRHKRSFENKMLPEYKEGEPYFEKMDYKFLPDPNKMLPKVFLSKKGIEIYKPSPKLLEQYGHGTHKKGDTFSMDDLHELIDFFKHSIEAHEDWKQFGFKFSDTATYENVSSFYREVEDQGYKLSFRKVSESYVYSLIDQGKLYLFQIYNKDFSPCSKGTPNLHTLYWRMLFDERNLADVIYKLDGKAEIFFREKSLKNDHPTHPAGKPIKKKSRQKKGEESLFEYDLVKDRRYTMDKFQFHVPITMNFKCSAGSKVNDMVNAHIREAKDMHVIGIDRGERNLLYICVIDSRGTILDQISLNTINDIDYHDLLESRDKDRQQEHRNWQTIEGIKELKQGYLSQAVHRIAELMVAYKAVVALEDLNMGFKRGRQKVESSVYQQFEKQLIDKLNYLVDKKKRPEDIGGLLRAYQFTAPFKSFKEMGKQNGFLFYIPAWNTSNIDPTTGFVNLFHVQYENVDKAKSFFQKFDSISYNPKKDWFEFAFDYKNFTKKAEGSRSMWILCTHGSRIKNFRNSQKNGQWDSEEFALTEAFKSLFVRYEIDYTADLKTAIVDEKQKDFFVDLLKLFKLTVQMRNSWKEKDLDYLISPVAGADGRFFDTREGNKSLPKDADANGAYNIALKGLWALRQIRQTSEGGKLKLAISNKEWLQFVQERSYEKDKRPAATKKAGQAKKKKGSYPYDVPDYAYPYDVPDYAYPYDVPDYA

SEQ ID NO: 21 - protein, 1368 aa, Prevotella disiens
  MISC_FEATURE (1)..(1368): PdCpf1; pY018
MENYQEFTNLFQLNKTLRFELKPIGKTCELLEEGKIFASGSFLEKDKVRADNVSYVKKEIDKKHKIFIEETLSSFSISNDLLKQYFDCYNELKAFKKDCKSDEEEVKKTALRNKCTSIQRAMREAISQAFLKSPQKKLLAIKNLIENVFKADENVQHFSEFTSYFSGFETNRENFYSDEEKSTSIAYRLVHDNLPIFIKNIYIFEKLKEQFDAKTLSEIFENYKLYVAGSSLDEVFSLEYFNNTLTQKGIDNYNAVIGKIVKEDKQEIQGLNEHINLYNQKHKDRRLPFFISLKKQILSDREALSWLPDMFKNDSEVIKALKGFYIEDGFENNVLTPLATLLSSLDKYNLNGIFIRNNEALSSLSQNVYRNFSIDEAIDANAELQTFNNYELIANALRAKIKKETKQGRKSFEKYEEYIDKKVKAIDSLSIQEINELVENYVSEFNSNSGNMPRKVEDYFSLMRKGDFGSNDLIENIKTKLSAAEKLLGTKYQETAKDIFKKDENSKLIKELLDATKQFQHFIKPLLGTGEEADRDLVFYGDFLPLYEKFEELTLLYNKVRNRLTQKPYSKDKIRLCFNKPKLMTGWVDSKTEKSDNGTQYGGYLFRKKNEIGEYDYFLGISSKAQLFRKNEAVIGDYERLDYYQPKANTIYGSAYEGENSYKEDKKRLNKVIIAYIEQIKQTNIKKSIIESISKYPNISDDDKVTPSSLLEKIKKVSIDSYNGILSFKSFQSVNKEVIDNLLKTISPLKNKAEFLDLINKDYQIFTEVQAVIDEICKQKTFIYFPISNVELEKEMGDKDKPLCLFQISNKDLSFAKTFSANLRKKRGAENLHTMLFKALMEGNQDNLDLGSGAIFYRAKSLDGNKPTHPANEAIKCRNVANKDKVSLFTYDIYKNRRYMENKFLFHLSIVQNYKAANDSAQLNSSATEYIRKADDLHIIGIDRGERNLLYYSVIDMKGNIVEQDSLNIIRNNDLETDYHDLLDKREKERKANRQNWEAVEGIKDLKKGYLSQAVHQIAQLMLKYNAIIALEDLGQMFVTRGQKIEKAVYQQFEKSLVDKLSYLVDKKRPYNELGGILKAYQLASSITKNNSDKQNGFLFYVPAWNTSKIDPVTGFTDLLRPKAMTIKEAQDFFGAFDNISYNDKGYFEFETNYDKFKIRMKSAQTRWTICTFGNRIKRKKDKNYWNYEEVELTEEFKKLFKDSNIDYENCNLKEEIQNKDNRKFFDDLIKLLQLTLQMRNSDDKGNDYIISPVANAEGQFFDSRNGDKKLPLDADANGAYNIARKGLWNIRQIKQTKNDKKLNLSISSTEWLDFVREKPYLKKRPAATKKAGQAKKKKGSYPYDVPDYAYPYDVPDYAYPYDVPDYA

SEQ ID NO: 22 - protein, 1291 aa, Porphyromonas macacae
  MISC_FEATURE (1)..(1291): PmCpf1; pY09
MKTQHFFEDFTSLYSLSKTIRFELKPIGKTLENIKKNGLIRRDEQRLDDYEKLKKVIDEYHEDFIANILSSFSFSEEILQSYIQNLSESEARAKIEKTMRDTLAKAFSEDERYKSIFKKELVKKDIPVWCPAYKSLCKKFDNFTTSLVPFHENRKNLYTSNEITASIPYRIVHVNLPKFIQNIEALCELQKKMGADLYLEMMENLRNVWPSFVKTPDDLCNLKTYNHLMVQSSISEYNRFVGGYSTEDGTKHQGINEWINIYRQRNKEMRLPGLVFLHKQILAKVDSSSFISDTLENDDQVFCVLRQFRKLFWNTVSSKEDDAASLKDLFCGLSGYDPEAIYVSDAHLATISKNIFDRWNYISDAIRRKTEVLMPRKKESVERYAEKISKQIKKRQSYSLAELDDLLAHYSEESLPAGFSLLSYFTSLGGQKYLVSDGEVILYEEGSNIWDEVLIAFRDLQVILDKDFTEKKLGKDEEAVSVIKKALDSALRLRKFFDLLSGTGAEIRRDSSFYALYTDRMDKLKGLLKMYDKVRNYLTKKPYSIEKFKLHFDNPSLLSGWDKNKELNNLSVIFRQNGYYYLGIMTPKGKNLFKTLPKLGAEEMFYEKMEYKQIAEPMLMLPKVFFPKKTKPAFAPDQSVVDIYNKKTFKTGQKGFNKKDLYRLIDFYKEALTVHEWKLFNFSFSPTEQYRNIGEFFDEVREQAYKVSMVNVPASYIDEAVENGKLYLFQIYNKDFSPYSKGIPNLHTLYWKALFSEQNQSRVYKLCGGGELFYRKASLHMQDTTVHPKGISIHKKNLNKKGETSLFNYDLVKDKRFTEDKFFFHVPISINYKNKKITNVNQMVRDYIAQNDDLQIIGIDRGERNLLYISRIDTRGNLLEQFSLNVIESDKGDLRTDYQKILGDREQERLRRRQEWKSIESIKDLKDGYMSQVVHKICNMVVEHKAIVVLENLNLSFMKGRKKVEKSVYEKFERMLVDKLNYLVVDKKNLSNEPGGLYAAYQLTNPLFSFEELHRYPQSGILFFVDPWNTSLTDPSTGFVNLLGRINYTNVGDARKFFDRFNAIRYDGKGNILFDLDLSRFDVRVETQRKLWTLTTFGSRIAKSKKSGKWMVERIENLSLCFLELFEQFNIGYRVEKDLKKAILSQDRKEFYVRLIYLFNLMMQIRNSDGEEDYILSPALNEKNLQFDSRLIEAKDLPVDADANGAYNVARKGLMVVQRIKRGDHESIHRIGRAQWLRYVQEGIVEKRPAATKKAGQAKKKKGSYPYDVPDYAYPYDVPDYAYPYDVPDYA

SEQ ID NO: 23 - protein, 399 aa, Francisella philomiragia subsp.
  MISC_FEATURE (1)..(399): Genbank ABZ87876 Cpf1
MFYLKQILSDTESKSFVIDKLEDDSDVVTTIQSFYEQIAAFKTLEEKSIKETLSLLFDDLKAQKLDLSKIYFKNDKSLTDLSQQVFDDYSLIGTSVLEYITQQVAPKNLDNPSKKEQELIAKKTEKAKYLSLETIRDALNEFNKHRDIDKQCRFEEIFASFADIPVLFDEIAQNKNNLAQISIKYQNQGKKDLLQTSAEVDVKAIKDLLDQTNNLLHKLKIFHITQSEDKANILDKDEHFYLVFDECYFELANIVPLYNKIRNYITQKPYSDEKFKLNFENSTLANGWDKNKEPDNTAILFIKDDKYYLGVMNKKNNKIFDDKAIKENKGEGYKKVVYKLLPGANKMLPKVFFSAKSINFYNPSEDILRIRNHSTHTKNGSPQKDMKNLSLILKIAENL

SEQ ID NO: 24 - protein, 485 aa, Francisella philomiragia subsp.
  MISC_FEATURE (1)..(485): Genbank ABZ87877 Cpf1
MVYKLNGEAELFYRKQSIPKKITHPAKQAIANKNKDNPKKESFFEYDLIKDKRFTEDKFFFHCPITMNFKSSGANKFNDEVNLLLKEKANDVHILSIDRGERHLAYYTLVDSKGNIIKQDTFNIIGNDRMKTNYHDKLAAIEKDRESARKDWKKINNIKEMKEGYLSQVVHEIAKLVIEYNAIVVFEDLNFGFKRGRFKVEKQVYQKLEKMLIEKLNYLVFKDNEFDKAGGVLRAYQLTAPFETFKKMGKQTGVIYYVPAGFTSKICPVTGFVNQLYPKYESVSKSQEFFSKFDKICYNLDKGYFEFSFDYKNFGDKAAKGKWTIASFGSRLINFRNSDKNHNWDTREVYPTKELEKLLKDYSIEYGHGECIKAAICGESDKKFFAKLTSILNSILQMRNSKTGTELDYLISPVADVNGNFFDSRHAPKNMPQDADANGAYHIGLKGLMLLYRIKNNQDGKKLNLVIKNEEYFEFVQNRNKSSKI

SEQ ID NO: 25 - protein, 939 aa, Francisella philomiragia subsp.
  MISC_FEATURE (1)..(939): Genbank AJI56734 Cpf1
MNLYSNLTNKYSLSKTLRFELIPQGETLENIKARGLILDDEKRAKDYKKAKQIIDKYHQFFIEEILSSVCISEDLLQNYSDVYFKLKKSDDDNLQKDFKSAKDTIKKHISRYINDSEKFKNLFNQNLIDAKKGQESDLILWLKQSKDNGIELFKANSDITDIDEALEIIKSFKGWTTYFKGFHENRKNVYSSDDIPTSIIYRIVDDNLPKFIENKAKYENLKDKAPEAINYEQIKKDLAEELTFDIDYKTSEVNQRVFSLDEVFEIANFNNYLNQSGITKFNTIIGGKFVNGENTKRKGINEYINLYSQQINDKTLKKYKMSVLFKQILSDTESKSFVIDKLEDDSDVVTTMQSFYEQIAAFKTLEEKSIKETLSLLFDDLKAQKLDLSKIYFKNDKSLTDLSQQVFDDYSVIGTAVLEYITQQVAPKNLDNPSKKEQDLIAKKTEKAKYLSLETIKLALEEFNKYRDIDKQCRFEEIFASFADIPVLFDEIAQNKNNLAQISIKYQNQGKKDLLQTSAEVDVKAIKDLLDQTNNLLHKLKIFHITQSEDKANILDKDEHFYLVFDECYFELANIVALYNKIRNYITQKPYSDEKFKLNFENSTLANGWDKNKEPDNTAILFIKDDKYYLGVMNKKNNKIFDDKAIKENKGEGYKKVVYKLLPGANKMLPKVFFSAKSINFYNPSEDILRIRNHSTHTKNGSPQKGYEKLEFNIEDCRKFIDFYKHSISRHPEWKDFGFRFSDTKKYNSIDEFYREVENQGYKLTFENISESYIDSLVDEGKLYLFQIYNKDFSVYSKGKPNLHTLYWKALFDERNLQDVVYKLNGEAELFYRKQSIPKKITHPAKEAIANKNKDNPKKESIFEYDLIKDKRFTEDKFFFHCPITINFKSSGANKFNDEINLLLKEKANDVHILSIDRGERHLAYYTLVDGKGNIICKN

SEQ ID NO: 26 - protein, 1261 aa, Moraxella bovoculi
  MISC_FEATURE (1)..(1261): Genbank AKG08867 Cpf1
MLFQDFTHLYPLSKTVRFELKPIGKTLEHIHAKNFLNQDETMADMYQKVKAILDDYHRDFIADMMGEVKLTKLAEFYDVYLKFRKNPKDDGLQKQLKDLQAVLRKEIVKPIGNGGKYKAGYDRLFGAKLFKDGKELGDLAKFVIAQEGESSPKLAHLAHFEKFSTYFTGFHDNRKNMYSDEDKHTAIAYRLIHENLPRFIDNLQILATIKQKHSALYDQIINELTASGLDVSLASHLDGYHKLLTQEGITAYNTLLGGISGEAGSRKIQGINELINSHHNQHCHKSERIAKLRPLHKQILSDGMGVSFLPSKFADDSEVCQAVNEFYRHYADVFAKVQSLFDGFDDYQKDGIYVEYKNLNELSKQAFGDFALLGRVLDGYYVDVVNPEFNERFAKAKTDNAKAKLTKEKDKFIKGVHSLASLEQAIEHYTARHDDESVQAGKLGQYFKHGLAGVDNPIQKIHNNHSTIKGFLERERPAGERALPKIKSDKSPEIRQLKELLDNALNVAHFAKLLTTKTTLHNQDGNFYGEFGALYDELAKIATLYNKVRDYLSQKPFSTEKYKLNFGNPTLLNGWDLNKEKDNFGVILQKDGCYYLALLDKAHKKVFDNAPNTGKSVYQKMIYKLLPGPNKMLPKVFFAKSNLDYYNPSAELLDKYAQGTHKKGDNFNLKDCHALIDFFKAGINKHPEWQHFGFKFSPTSSYQDLSDFYREVEPQGYQVKFVDINADYINELVEQGQLYLFQIYNKDFSPKAHGKPNLHTLYFKALFSEDNLVNPIYKLNGEAEIFYRKASLDMNETTIHRAGEVLENKNPDNPKKRQFVYDIIKDKRYTQDKFMLHVPITMNFGVQGMTIKEFNKKVNQSIQQYDEVNVIGIDRGERHLLYLTVINSKGEILEQRSLNDITTASANGTQMTTPYHKILDKREIERLNARVGWGEIETIKELKSGYLSHVVHQISQLMLKYNAIVVLEDLNFGFKRGRFKVEKQIYQNFENALIKKLNHLVLKDKADDEIGSYKNALQLTNNFTDLKSIGKQTGFLFYVPAWNTSKIDPETGFVDLLKPRYENIAQSQAFFGKFDKICYNADRGYFEFHIDYAKFNDKAKNSRQIWKICSHGDKRYVYDKTANQNKGATIGVNVNDELKSLFTRYHINDKQPNLVMDICQNNDKEFHKSLMYLLKTLLALRYSNASSDEDFILSPVANDEGVFFNSALADDTQPQNADANGAYHIALKGLWLLNELKNSDDLNKVKLAIDNQTWLNFAQNR

SEQ ID NO: 27 - protein, 1282 aa, Eubacterium eligens
  MISC_FEATURE (1)..(1282): Genbank CDA41776 Cpf1
MNGNRSIVYREFVGVTPVAKTLRNELRPVGHTQEHIIQNGLIQEDELRQEKSTELKNIMDDYYREYIDKSLSGLTDLDFTLLFELMNSVQSSLSKDNKKALEKEHNKMREQICTHLQSDSDYKNMFNAKLFKEILPDFIKNYNQYDVKDKAGKLETLALFNGFSTYFTDFFEKRKNVFTKEAVSTSIAYRIVHENSLIFLANMTSYKKISEKALDEIEVIEKNNQDKMGDWELNQIFNPDFYNMVLIQSGIDFYNEICGVVNAHMNLYCQQTKNNYNLFKMRKLHKQILAYTSTSFEVPKMFEDDMSVYNAVNAFIDETEKGNIIGKLKDIVNKYDELDEKRIYISKDFYETLSCFMSGNWNLITGCVENFYDENIHAKGKSKEEKVKKAVKEDKYKSINDVNDLVEKYIDEKERNEFKNSNAKQYIREISNIITDTETAHLEYDEHISLIESEEKADEIKKRLDMYMNMYHWVKAFIVDEVLDRDEMFYSDIDDIYNILENIVPLYNRVRNYVTQKPYTSKKIKLNFQSPTLANGWSQSKEFDNNAIILIRDNKYYLAIFNAKNKPDKKIIQGNSDKKNDNDYKKMVYNLLPGANKMLPKVFLSKKGIETFKPSDYIISGYNAHKHIKTSENFDISFCRDLIDYFKNSIEKHAEWRKYEFKFSATDSYNDISEFYREVEMQGYRIDWTYISEADINKLDEEGKIYLFQIYNKDFAENSTGKENLHTMYFKNIFSEENLKNIVIKLNGQAELFYRKASVKNPVKHKKDSVLVNKTYKNQLDNGDVVRIPIPDDIYNEIYKMYNGYIKESDLSEAAKEYLDKVEVRTAQKDIVKDYRYTVDKYFIHTPITINYKVTARNNVNDMAVKYIAQNDDIHVIGIDRGERNLIYISVIDSHGNIVKQKSYNILNNYDYKKKLVEKEKTREYARKNWKSIGNIKELKEGYISGVVHEIAMLMVEYNAIIAMEDLNYGFKRGRFKVERQVYQKFESMLINKLNYFASKGKSVDEPGGLLKGYQLTYVPDNIKNLGKQCGVIFYVPAAFTSKIDPSTGFISAFNFKSISTNASRKQFFMQFDEIRYCAEKDMFSFGFDYNNFDTYNITMGKTQWTVYTNGERLQSEFNNARRTGKTKSINLTETIKLLLEDNEINYADGHDVRIDMEKMYEDKNSEFFAQLLSLYKLTVQMRNSYTEAEEQEKGISYDKIISPVINDEGEFFDSDNYKESDDKECKMPKDADANGAYCIALKGLYEVLKIKSEWTEDGFDRNCLKLPHAEWLDFIQNKRYE

SEQ ID NO: 28 - protein, 1263 aa, Eubacterium rectale
  MISC_FEATURE (1)..(1263): Genbank CUM80100 Cpf1
MNNGTNNFQNFIGISSLQKTLRNALIPTETTQQFIVKNGIIKEDELRGENRQILKDIMDDYYRGFISETLSSIDDIDWTSLFEKMEIQLKNGDNKDTLIKEQAEKRKAIYKKFADDDRFKNMFSAKLISDILPEFVIHNNNYSASEKEEKTQVIKLFSRFATSFKDYFKNRANCFSADDISSSSCHRIVNDNAEIFFSNALVYRRIVKNLSNDDINKISGDMKDSLKEMSLDEIYSYEKYGEFITQEGISFYNDICGKVNSFMNLYCQKNKENKNLYKLRKLHKQILCIADTSYEVPYKFESDEEVYQSVNGFLDNISSKHIVERLRKIGDNYNGYNLDKIYIVSRFYESVSQKTYRDWETINTALEIHYNNILPGNGKSKADKVKKAVKNDLQKSITEINELVSNYKLCPDDNIKAETYIHEISHILNNFEAQELKYNPEIHLVESELKASELKNVLDVIMNAFHWCSVFMTEELVDKDNNFYAELEEIYDEIYPVISLYNLVRNYVTQKPYSTKKIKLNFGIPTLADGWSKSKEYSNNAIILMRDNLYYLGIFNAKNKPDKKIIEGNTSENKGDYKKMIYNLLPGPNKMIPKVFLSSKTGVETYKPSAYILEGYKQNKHLKSSKDFDITFCRDLIDYFKNCIAIHPEWKNFGFDFSDTSTYEDISGFYREVELQGYKIDWTYISEKDIDLLQEKGQLYLFQIYNKDFSKKSTGNDNLHTMYLKNLFSEENLKDIVLKLNGEAEIFFRKSSIKNPIIHKKGSILVNRTYEAEEKDQFGNIQIVRKTIPENIYQELYKYFNDKSDKELSDEAAKLKNVVGHHEAATNIVKDYRYTYDKYFLHMPITINFKANKTSFINDRILQYIAKENDLHVIGIDRGERNLIYVSVIDTCGNIVEQKSFNIVNGYDYQIKLKQQEGARQIARKEWKEIGKIKEIKEGYLSLVIHEISKMVIKYNAIIAMEDLSYGFKKGRFKVERQVYQKFETMLINKLNYLVFKDISITENGGLLKGYQLTYIPEKLKNVGHQCGCIFYVPAAYTSKIDPTTGFANIFKFKDLTVDAKREFIKKFDSIRYDSEKNLFCFTFDYNNFITQNTVMSKSSWSVYTYGVRIKRRFVNGRFSNESDTIDITKDMEKTLEMTDINWRDGHDLRQDIIDYEIVQHIFEIFKLTVQMRNSLSELEDRDYDRLISPVLNENNIFYDSAKAGDALPKDADANGAYCIALKGLYEIKQITENWKEDGKFSRDKLKISNKDWFDFIQNKRYL

SEQ ID NO: 29 - protein, 966 aa, Unknown
  Uncultured Bacterium (groundwater metagenome) hypothetical protein ACD_18C00234G0001
  MISC_FEATURE (1)..(966): Genbank EKE06926 Cpf1
MENYDKCLTQLGIEKFNLEIVGEINKELNLFSQQNRDILPKAPKLKFLYKQIGCGKRIFDLFSIIVGNEWKELKNLQNNKDDGKSFSQKELLEKIRKLYKLFFDKPSDYELDKIYFNKQSINTISSMWFVNWHKLSELLSGKRIIKNKNKETGEYTIPKKISLADLKNILESETNVEDLFKKGKINEDEIKENNSVGVYEKLFSSNGWETFLAIWEYEINESFKVLDNNVAKFELKKQTKFQNLDKKERVFFIKEFCDAFLAIERMVKYHKVDENNDTDDNFYETIDLYLQETELRKYYDAFRNYLTEKPFSENKIKLNFKSGTLLGGWSQTFETYGSLIFEKNGEYFLGIINGTKFSESELNKIYNINSDSIKAKRLLYNTQKIDNKNPPRWFIRSKKTTFSPMVREGLLDPESILELYDKKLYSKTENKNGYKEYLPRLLDYFKDGFLKHKDFVQFKENFKWLDNSEYDTVVDFYNHTADMCYKTSWEDINFTELENLTKDSRIYLFKIYNKDFAEKTSGIKNSHTILFLELLKSENNLKLKLLGGGEVFYREKSIEKEIDKERSFKTDKFEIIKNKRYSEEKYFLHFPIEIKGRKLKGSFNQFLNKEISKKESVNILGIDRGEKHLLYYSLVNNNGEIIKQGSFNKIKCGNKIVDYNELLSKRAKEMMEARQSWETIGKIKDLKEGYLSQVIHEIYKLVIENNAIVVLEDLNTEFKAKRTAKVEKSVYKKFELALVKKLNHLILKEKKANELGGSLNAYQLTPYIKPGDVDKFEKAKQWGIMFYVRPDYTSQTDPVTGWRKTIYISNSETIENIKKKWKDANIKIYFDSDKKCFKFLYDKWELCAYPNLERLYWNRSEKNAEGKFGNMKKYSLHKEFECIFEGVNKSKNISDQMFDKEDFNWKSFIFYWNLLNQIRNSDKSKDENESDFIQSPIWSEKINDFFDSRKKYQIDLPENGDANGAY

SEQ ID NO: 30 - protein, 1247 aa, Unknown
  Uncultured bacterium (gcode 4) (groundwater metagenome) hypothetical protein ACD_3C00058G0015
  MISC_FEATURE (1)..(1247): Genbank EKE28449 Cpf1
MFKGDAFTGLYEVQKTLRFELVPIGLTQSYLENDWVIQKDKEVEENYGKIKAYFDLIHKEFVRQSLENAWLCQLDDFYEKYIELHNSLETRKDKNLAKQFEKVMKSLKKEFVSFFDAKWNEWKQKFSFLKKWWIDVLNEKEVLDLMAEFYPDEKELFDKFDKFFTYFSNFKESRKNFYADDGRAWAIATRAIDENLITFIKNIEDFKKLNSSFREFVNDNFSEEDKQIFEIDFYNNCLLQPWIDKYNKIVWWYSLENWEKVQWLNEKINNFKQNQNKSNSKDLKFPRMKLLYKQILGDKEKKVYIDEIRDDKNLIDLIDNSKRRNQIKIDNANDIINDFINNNAKFELDKIYLTRQSINTISSKYFSSWDYIRWYFWTGELQEFVSFYDLKETFWKIEYETLENIFKDCYVKGINTESQNNIVFETQGIYENFLNIFKFEFNQNISQISLLEWELDKIQNEDIKKNEKQVEVIKNYFDSVMSVYKMTKYFSLEKWKKRVELDTDNNFYNDFNEYLEGFEIWKDYNLVRNYITKKQVNTDKIKLNFDNSQFLTWWDKDKENERLGIILRREWKYYLWILKKWNTLNFGDYLQKEWEIFYEKMNYKQLNNVYRQLPRLLFPLTKKLNELKWDELKKYLSKYIQNFWYNEEIAQIKIEFDIFQESKEKWEKFDIDKLRKLIEYYKKWVLALYSDLYDLEFIKYKNYDDLSIFYSDVEKKMYNLNFTKIDKSLIDGKVKSWELYLFQIYNKDFSESKKEWSTENIHTKYFKLLFNEKNLQNLVVKLSWWADIFFRDKTENLKFKKDKNGQEILDHRRFSQDKIMFHISITLNANCWDKYWFNQYVNEYMNKERDIKIIWIDRWEKHLAYYCVIDKSWKIFNNEIWTLNELNWVNYLEKLEKIESSRKDSRISWWEIENIKELKNGYISQVINKLTELIVKYNAIIVFEDLNIWFKRWRQKIEKQIYQKLELALAKKLNYLTQKDKKDDEILWNLKALQLVPKVNDYQDIWNYKQSWIMFYVRANYTSVTCPNCWLRKNLYISNSATKENQKKSLNSIAIKYNDWKFSFSYEIDDKSWKQKQSLNKKKFIVYSDIERFVYSPLEKLTKVIDVNKKLLELFRDFNLSLDINKQIQEKDLDSVFFKSLTHLFNLILQLRNSDSKDNKDYISCPSCYYHSNNWLQWFEFNWDANWAYNIARKGIILLDRIRKNQEKPDLYVSDIDWDNFVQSNQFPNTIIPIQNIEKQVPLNIKI

SEQ ID NO: 31 - protein, 1250 aa, Smithella sp.
  MISC_FEATURE (1)..(1250): Genbank KFO67989 Cpf1
MQTLFENFTNQYPVSKTLRFELIPQGKTKDFIEQKGLLKKDEDRAEKYKKVKNIIDEYHKDFIEKSLNGLKLDGLEEYKTLYLKQEKDDKDKKAFDKEKENLRKQIANAFRNNEKFKTLFAKELIKNDLMSFACEEDKKNVKEFEAFTTYFTGFHQNRANMYVADEKRTAIASRLIHENLPKFIDNIKIFEKMKKEAPELLSPFNQTLKDMKDVIKGTTLEEIFSLDYFNKTLTQSGIDIYNSVIGGRTPEEGKTKIKGLNEYINTDFNQKQTDKKKRQPKFKQLYKQILSDRQSLSFIAEAFKNDTEILEAIEKFYVNELLHFSNEGKSTNVLDAIKNAVSNLESFNLTKIYFRSGTSLTDVSRKVFGEWSIINRALDNYYATTYPIKPREKSEKYEERKEKWLKQDFNVSLIQTAIDEYDNETVKGKNSGKVIVDYFAKFCDDKETDLIQKVNEGYIAVKDLLNTPYPENEKLGSNKDQVKQIKAFMDSIMDIMHFVRPLSLKDTDKEKDETFYSLFTPLYDHLTQTIALYNKVRNYLTQKPYSTEKIKLNFENSTLLGGWDLNKETDNTAIILRKENLYYLGIMDKRHNRIFRNVPKADKKDSCYEKMVYKLLPGANKMLPKVFFSQSRIQEFTPSAKLLENYENETHKKGDNFNLNHCHQLIDFFKDSINKHEDWKNFDFRFSATSTYADLSGFYHEVEHQGYKISFQSIADSFIDDLVNEGKLYLFQIYNKDFSPFSKGKPNLHTLYWKMLFDENNLKDVVYKLNGEAEVFYRKKSIAEKNTTIHKANESIINKNPDNPKATSTFNYDIVKDKRYTIDKFQFHVPITMNFKAEGIFNMNQRVNQFLKANPDINIIGIDRGERHLLYYTLINQKGKILKQDTLNVIANEKQKVDYHNLLDKKEGDRATARQEWGVIETIKELKEGYLSQVIHKLTDLMIENNAIIVMEDLNFGFKRGRQKVEKQVYQKFEKMLIDKLNYLVDKNKKANELGGLLNAFQLANKFESFQKMGKQNGFIFYVPAWNTSKTDPATGFIDFLKPRYENLKQAKDFFEKFDSIRLNSKADYFEFAFDFKNFTGKADGGRTKWTVCTTNEDRYAWNRALNNNRGSQEKYDITAELKSLFDGKVDYKSGKDLKQQIASQELADFFRTLMKYLSVTLSLRHNNGEKGETEQDYILSPVADSMGKFFDSRKAGDDMPKNADANGAYHIALKGLWCLEQISKTDDLKKVKLAISNKEWLEFMQTLKG

SEQ ID NO: 32 - protein, 1477 aa, Candidatus Peregrinibacteria
  MISC_FEATURE (1)..(1477): Genbank KKP36646 Cpf1
MSNFFKNFTNLYELSKTLRFELKPVGDTLTNMKDHLEYDEKLQTFLKDQNIDDAYQALKPQFDEIHEEFITDSLESKKAKEIDFSEYLDLFQEKKELNDSEKKLRNKIGETFNKAGEKWKKEKYPQYEWKKGSKIANGADILSCQDMLQFIKYKNPEDEKIKNYIDDTLKGFFTYFGGFNQNRANYYETKKEASTAVATRIVHENLPKFCDNVIQFKHIIKRKKDGTVEKTERKTEYLNAYQYLKNNNKITQIKDAETEKMIESTPIAEKIFDVYYFSSCLSQKQIEEYNRIIGHYNLLINLYNQAKRSEGKHLSANEKKYKDLPKFKTLYKQIGCGKKKDLFYTIKCDTEEEANKSRNEGKESHSVEEIINKAQEAINKYFKSNNDCENINTVPDFINYILTKENYEGVYWSKAAMNTISDKYFANYHDLQDRLKEAKVFQKADKKSEDDIKIPEAIELSGLFGVLDSLADWQTTLFKSSILSNEDKLKIITDSQTPSEALLKMIFNDIEKNMESFLKETNDIITLKKYKGNKEGTEKIKQWFDYTLAINRMLKYFLVKENKIKGNSLDTNISEALKTLIYSDDAEWFKWYDALRNYLTQKPQDEAKENKLKLNFDNPSLAGGWDVNKECSNFCVILKDKNEKKYLAIMKKGENTLFQKEWTEGRGKNLTKKSNPLFEINNCEILSKMEYDFWADVSKMIPKCSTQLKAVVNHFKQSDNEFIFPIGYKVTSGEKFREECKISKQDFELNNKVFNKNELSVTAMRYDLSSTQEKQYIKAFQKEYWELLFKQEKRDTKLTNNEIFNEWINFCNKKYSELLSWERKYKDALTNWINFCKYFLSKYPKTTLFNYSFKESENYNSLDEFYRDVDICSYKLNINTTINKSILDRLVEEGKLYLFEIKNQDSNDGKSIGHKNNLHTIYWNAIFENFDNRPKLNGEAEIFYRKAISKDKLGIVKGKKTKNGTEIIKNYRFSKEKFILHVPITLNFCSNNEYVNDIVNTKFYNFSNLHFLGIDRGEKHLAYYSLVNKNGEIVDQGTLNLPFTDKDGNQRSIKKEKYFYNKQEDKWEAKEVDCWNYNDLLDAMASNRDMARKNWQRIGTIKEAKNGYVSLVIRKIADLAVNNERPAFIVLEDLNTGFKRSRQKIDKSVYQKFELALAKKLNFLVDKNAKRDEIGSPTKALQLTPPVNNYGDIENKKQAGIMLYTRANYTSQTDPATGWRKTIYLKAGPEETTYKKDGKIKNKSVKDQIIETFTDIGFDGKDYYFEYDKGEFVDEKTGEIKPKKWRLYSGENGKSLDRFRGEREKDKYEWKIDKIDIVKILDDLFVNFDKNISLLKQLKEGVELTRNNEHGTGESLRFAINLIQQIRNTGNNERDNDFILSPVRDENGKHFDSREYWDKETKGEKISMPSSGDANGAFNIARKGIIMNAHILANSDSKDLSLFVSDEEWDLHLNNKTEWKKQLNIFSSRKAMAKRKK

SEQ ID NO: 33 - protein, 1285 aa, Candidatus Roizmanbacteria bacterium
  MISC_FEATURE (1)..(1285): Genbank KKQ38174 Cpf1
MKSFDSFTNLYSLSKTLKFEMRPVGNTQKMLDNAGVFEKDKLIQKKYGKTKPYFDRLHREFIEEALTGVELIGLDENFRTLVDWQKDKKNNVAMKAYENSLQRLRTEIGKIFNLKAEDWVKNKYPILGLKNKNTDILFEEAVFGILKARYGEEKDTFIEVEEIDKTGKSKINQISIFDSWKGFTGYFKKFFETRKNFYKNDGTSTAIATRIIDQNLKRFIDNLSIVESVRQKVDLAETEKSFSISLSQFFSIDFYNKCLLQDGIDYYNKIIGGETLKNGEKLIGLNELINQYRQNNKDQKIPFFKLLDKQILSEKILFLDEIKNDTELIEALSQFAKTAEEKTKIVKKLFADFVENNSKYDLAQIYISQEAFNTISNKWTSETETFAKYLFEAMKSGKLAKYEKKDNSYKFPDFIALSQMKSALLSISLEGHFWKEKYYKISKFQEKTNWEQFLAIFLYEFNSLFSDKINTKDGETKQVGYYLFAKDLHNLILSEQIDIPKDSKVTIKDFADSVLTIYQMAKYFAVEKKRAWLAEYELDSFYTQPDTGYLQFYDNAYEDIVQVYNKLRNYLTKKPYSEEKWKLNFENSTLANGWDKNKESDNSAVILQKGGKYYLGLITKGHNKIFDDRFQEKFIVGIEGGKYEKIVYKFFPDQAKMFPKVCFSAKGLEFFRPSEEILRIYNNAEFKKGETYSIDSMQKLIDFYKDCLTKYEGWACYTFRHLKPTEEYQNNIGEFFRDVAEDGYRIDFQGISDQYIHEKNEKGELHLFEIHNKDWNLDKARDGKSKTTQKNLHTLYFESLFSNDNVVQNFPIKLNGQAEIFYRPKTEKDKLESKKDKKGNKVIDHKRYSENKIFFHVPLTLNRTKNDSYRFNAQINNFLANNKDINIIGVDRGEKHLVYYSVITQASDILESGSLNELNGVNYAEKLGKKAENREQARRDWQDVQGIKDLKKGYISQVVRKLADLAIKHNAIIILEDLNMRFKQVRGGIEKSIYQQLEKALIDKLSFLVDKGEKNPEQAGHLLKAYQLSAPFETFQKMGKQTGIIFYTQASYTSKSDPVTGWRPHLYLKYFSAKKAKDDIAKFTKIEFVNDRFELTYDIKDFQQAKEYPNKTVWKVCSNVERFRWDKNLNQNKGGYTHYTNITENIQELFTKYGIDITKDLLTQISTIDEKQNTSFFRDFIFYFNLICQIRNTDDSEIAKKNGKDDFILSPVEPFFDSRKDNGNKLPENGDDNGAYNIARKGIVILNKISQYSEKNENCEKMKWGDLYVSNIDWDNFVTQANARH

SEQ ID NO: 34 - protein, 1403 aa, Candidatus Falkowbacteria bacterium
  MISC_FEATURE (1)..(1403): Genbank KKR91555 Cpf1
MLFFMSTDITNKPREKGVFDNFTNLYEFSKTLTFGLIPLKWDDNKKMIVEDEDFSVLRKYGVIEEDKRIAESIKIAKFYLNILHRELIGKVLGSLKFEKKNLENYDRLLGEIEKNNKNENISEDKKKEIRKNFKKELSIAQDILLKKVGEVFESNGSGILSSKNCLDELTKRFTRQEVDKLRRENKDIGVEYPDVAYREKDGKEETKSFFAMDVGYLDDFHKNRKQLYSVKGKKNSLGRRILDNFEIFCKNKKLYEKYKNLDIDFSEIERNFNLTLEKVFDFDNYNERLTQEGLDEYAKILGGESNKQERTANIHGLNQIINLYIQKKQSEQKAEQKETGKKKIKFNKKDYPTFTCLQKQILSQVFRKEIIIESDRDLIRELKFFVEESKEKVDKARGIIEFLLNHEENDIDLAMVYLPKSKINSFVYKVFKEPQDFLSVFQDGASNLDFVSFDKIKTHLENNKLTYKIFFKTLIKENHDFESFLILLQQEIDLLIDGGETVTLGGKKESITSLDEKKNRLKEKLGWFEGKVRENEKMKDEEEGEFCSTVLAYSQAVLNITKRAEIFWLNEKQDAKVGEDNKDMIFYKKFDEFADDGFAPFFYFDKFGNYLKRRSRNTTKEIKLHFGNDDLLEGWDMNKEPEYWSFILRDRNQYYLGIGKKDGEIFHKKLGNSVEAVKEAYELENEADFYEKIDYKQLNIDRFEGIAFPKKTKTEEAFRQVCKKRADEFLGGDTYEFKILLAIKKEYDDFKARRQKEKDWDSKFSKEKMSKLIEYYITCLGKRDDWKRFNLNFRQPKEYEDRSDFVRHIQRQAYWIDPRKVSKDYVDKKVAEGEMFLFKVHNKDFYDFERKSEDKKNHTANLFTQYLLELFSCENIKNIKSKDLIESIFELDGKAEIRFRPKTDDVKLKIYQKKGKDVTYADKRDGNKEKEVIQHRRFAKDALTLHLKIRLNFGKHVNLFDFNKLVNTELFAKVPVKILGMDRGENNLIYYCFLDEHGEIENGKCGSLNRVGEQIITLEDDKKVKEPVDYFQLLVDREGQRDWEQKNWQKMTRIKDLKKAYLGNVVSWISKEMLSGIKEGVVTIGVLEDLNSNFKRTRFFRERQVYQGFEKALVNKLGYLVDKKYDNYRNVYQFAPIVDSVEEMEKNKQIGTLVYVPASYTSKICPHPKCGWRERLYMKNSASKEKIVGLLKSDGIKISYDQKNDRFYFEYQWEQEHKSDGKKKKYSGVDKVFSNVSRMRWDVEQKKSIDFVDGTDGSITNKLKSLLKGKGIELDNINQQIVNQQKELGVEFFQSIIFYFNLIMQIRNYDKEKSGSEADYIQCPSCLFDSRKPEMNGKLSAITNGDANGAYNIARKGFMQLCRIRENPQEPMKLITNREWDEAVREWDIYSAAQKIPVLSEEN

SEQ ID NO: 35 - protein, 1352 aa, Parcubacteria group bacterium
  MISC_FEATURE (1)..(1352): Genbank KKT48220 Cpf1
MENIFDQFIGKYSLSKTLRFELKPVGKTEDFLKINKVFEKDQTIDDSYNQAKFYFDSLHQKFIDAALASDKTSELSFQNFADVLEKQNKIILDKKREMGALRKRDKNAVGIDRLQKEINDAEDIIQKEKEKIYKDVRTLFDNEAESWKTYYQEREVDGKKITFSKADLKQKGADFLTAAGILKVLKYEFPEEKEKEFQAKNQPSLFVEEKENPGQKRYIFDSFDKFAGYLTKFQQTKKNLYAADGTSTAVATRIADNFIIFHQNTKVFRDKYKNNHTDLGFDEENIFEIERYKNCLLQREIEHIKNENSYNKIIGRINKKIKEYRDQKAKDTKLTKSDFPFFKNLDKQILGEVEKEKQLIEKTREKTEEDVLIERFKEFIENNEERFTAAKKLMNAFCNGEFESEYEGIYLKNKAINTISRRWFVSDRDFELKLPQQKSKNKSEKNEPKVKKFISIAEIKNAVEELDGDIFKAVFYDKKIIAQGGSKLEQFLVIWKYEFEYLFRDIERENGEKLLGYDSCLKIAKQLGIFPQEKEAREKATAVIKNYADAGLGIFQMMKYFSLDDKDRKNTPGQLSTNFYAEYDGYYKDFEFIKYYNEFRNFITKKPFDEDKIKLNFENGALLKGWDENKEYDFMGVILKKEGRLYLGIMHKNHRKLFQSMGNAKGDNANRYQKMIYKQIADASKDVPRLLLTSKKAMEKFKPSQEILRIKKEKTFKRESKNFSLRDLHALIEYYRNCIPQYSNWSFYDFQFQDTGKYQNIKEFTDDVQKYGYKISFRDIDDEYINQALNEGKMYLFEVVNKDIYNTKNGSKNLHTLYFEHILSAENLNDPVFKLSGMAEIFQRQPSVNEREKITTQKNQCILDKGDRAYKYRRYTEKKIMFHMSLVLNTGKGEIKQVQFNKIINQRISSSDNEMRVNVIGIDRGEKNLLYYSVVKQNGEIIEQASLNEINGVNYRDKLIEREKERLKNRQSWKPVVKIKDLKKGYISHVIHKICQLIEKYSAIVVLEDLNMRFKQIRGGIERSVYQQFEKALIDKLGYLVFKDNRDLRAPGGVLNGYQLSAPFVSFEKMRKQTGILFYTQAEYTSKTDPITGFRKNVYISNSASLDKIKEAVKKFDAIGWDGKEQSYFFKYNPYNLADEKYKNSTVSKEWAIFASAPRIRRQKGEDGYWKYDRVKVNEEFEKLLKVWNFVNPKATDIKQEIIKKEKAGDLQGEKELDGRLRNFWHSFIYLFNLVLELRNSFSLQIKIKAGEVIAVDEGVDFIASPVKPFFTTPNPYIPSNLCWLAVENADANGAYNIARKGVMILKKIREHAKKDPEFKKLPNLFISNAEWDEAARDWGKYAGTTALNLDH

SEQ ID NO: 36 - protein, 1298 aa, Thiomicrospira sp.
  MISC_FEATURE (1)..(1298): Genbank KUJ74576 Cpf1
MTKTFDSEFFNLYSLQKTVRFELKPVGETASFVEDFKNEGLKRVVSEDERRAVDYQKVKEIIDDYHRDFIEESLNYFPEQVSKDALEQAFHLYQKLKAAKVEEREKALKEWEALQKKLREKVVKCFSDSNKARFSRIDKKELIKEDLINWLVAQNREDDIPTVETFNNFTTYFTGFHENRKNIYSKDDHATAISFRLIHENLPKFFDNVISFNKLKEGFPELKFDKVKEDLEVDYDLKHAFEIEYFVNFVTQAGIDQYNYLLGGKTLEDGTKKQGMNEQINLFKQQQTRDKARQIPKLIPLFKQILSERTESQSFIPKQFESDQELFDSLQKLHNNCQDKFTVLQQAILGLAEADLKKVFIKTSDLNALSNTIFGNYSVFSDALNLYKESLKTKKAQEAFEKLPAHSIHDLIQYLEQFNSSLDAEKQQSTDTVLNYFIKTDELYSRFIKSTSEAFTQVQPLFELEALSSKRRPPESEDEGAKGQEGFEQIKRIKAYLDTLMEAVHFAKPLYLVKGRKMIEGLDKDQSFYEAFEMAYQELESLIIPIYNKARSYLSRKPFKADKFKINFDNNTLLSGWDANKETANASILFKKDGLYYLGIMPKGKTFLFDYFVSSEDSEKLKQRRQKTAEEALAQDGESYFEKIRYKLLPGASKMLPKVFFSNKNIGFYNPSDDILRIRNTASHTKNGTPQKGHSKVEFNLNDCHKMIDFFKSSIQKHPEWGSFGFTFSDTSDFEDMSAFYREVENQGYVISFDKIKETYIQSQVEQGNLYLFQIYNKDFSPYSKGKPNLHTLYWKALFEEANLNNVVAKLNGEAEIFFRRHSIKASDKVVHPANQAIDNKNPHTEKTQSTFEYDLVKDKRYTQDKFFFHVPISLNFKAQGVSKFNDKVNGFLKGNPDVNIIGIDRGERHLLYFTVVNQKGEILVQESLNTLMSDKGHVNDYQQKLDKKEQERDAARKSWTTVENIKELKEGYLSHVVHKLAHLIIKYNAIVCLEDLNFGFKRGRFKVEKQVYQKFEKALIDKLNYLVFKEKELGEVGHYLTAYQLTAPFESFKKLGKQSGILFYVPADYTSKIDPTTGFVNFLDLRYQSVEKAKQLLSDFNAIRFNSVQNYFEFEIDYKKLTPKRKVGTQSKWVICTYGDVRYQNRRNQKGHWETEEVNVTEKLKALFASDSKTTTVIDYANDDNLIDVILEQDKASFFKELLWLLKLTMTLRHSKIKSEDDFILSPVKNEQGEFYDSRKAGEVWPKDADANGAYHIALKGLWNLQQINQWEKGKTLNLAIKNQDWFSFIQEKPYQE

SEQ ID NO: 37 - protein, 1242 aa, Bacteroidales bacterium
  MISC_FEATURE (1)..(1242): Genbank KXB38146 Cpf1
MKKFTNLYPVQKTLRFELIPQGNTSKHLCKIIQEDEQIAEDSQEVKKLLDRYHKEFIAIALSSFPTSPLAKEIIPKLKEFAQIRATGDAKQISTIQDELRELVVKGFKGEGEQERRYKILIGAKGNPNADELFNTELINFLKDPAEQALVKKFQKHTGYFLGFNENRKNMYSAKAQSTAIAYRLIHENLPRFLDNITTYEKVKTYLKEEIPQLEKELVRAGASLVSHVDSVFTIDFFLEVFTQSGIDQYNALIGKIVNQEQGEVKGLNERINLYNQQHKQEAKLPLFKPLYKQILSDREQLSWLAEAYNSDKDLLDSIQKYYQLLIDNQIFERIPRLMHTLEKAPLDKIWITYDTQLTSISNTLYGSWRVIGEALGRNAKSEKERKSSQKKALNYSLESINQAIAKMPSDEELPPIQKYFIALGSNPSKKDASSGTLVDKVRSSYKACQDILTNPDHTGKKLIQDKKQVDLLKQLLDDLLILQRFIKPLLYSNNENETHKDEVFYTELTDIMDLLNPIVGLYNKVRNYLTQKPYSTEKFKINFKSSSLLAGWDRNKEKDNLGVILKREDKYYLAIMDKAHNATFKNKSLPTQGECYEKMEYKLLPGANKMLPKVYITSKKGIESFHPSEELQKKYKLGTHKKGASFNLSDMRALIDYFKESLEKHEEHSQFGFHFSDTSTYEDISGFYREVEQQAYKITFRKVSVEYIDQLVNEGKLYLFQIYNKDFSPYSKGTPNLHTLYWKMLFDPANLQDIVYKLNGEAEVFFRKKSLQYDRPTHPKGQPINKKSLLNEGETSLFDYDLIKDRRFTVDKFQFHVPITMNFKATQGTKVNQMVQEEVKKSKGFHLIGIDRGERNLLYIVVINERGEIIEQCSLNKIVNTYQEKEHTVDYKALLEKRSQSRLEERKSWQTIENIKELKGGYLSQVVHKIAQLMIKYNAIAVLEDLNFGFIRTRKKFEFSVYQEFEKKLIDKLGYVVDKKAPIQQEGGLLQAYQLTAPFKSFREMGKQNGFLFYVPAWNTSAIDPRTGFVNLLDTRYESIAKTKELIKKLKDIRYNSQKDWFEIDLDYNAFGNRAKGSRSKWRLCSYGERIEHTRKQDSNGQEESDSMVVLTEAFKDVFTKYQIDYRENLKEQLLLQSDKAFFVDFLSLLRLTLQLRNSLSNSLIDYILSPVADENGEFFDSRKALSNEPQDADANGAYHIALKGLWVLDKIRKTEKVTPAKLALSNQEWLSFAQEKPFFNE

SEQ ID NO: 38 - protein, 1300 aa, Francisella tularensis
  MISC_FEATURE (1)..(1300): Genbank WP_003040289 Cpf1
MSIYQEFVNKYSLSKTLRFELIPQGKTLENIKARGLILDDEKRAKDYKKAKQIIDKYHQFFIEEILSSVCISEDLLQNYSDVYFKLKKSDDDNLQKDFKSAKDTIKKQISEYIKDSEKFKNLFNQNLIDAKKGQESDLILWLKQSKDNGIELFKANSDITDIDEALEIIKSFKGWTTYFKGFHENRKNVYSSNDIPTSIIYRIVDDNLPKFLENKAKYESLKDKAPEAINYEQIKKDLAEELTFDIDYKTSEVNQRVFSLDEVFEIANFNNYLNQSGITKFNTIIGGKFVNGENTKRKGINEYINLYSQQINDKTLKKYKMSVLFKQILSDTESKSFVIDKLEDDSDVVTTMQSFYEQIAAFKTVEEKSIKETLSLLFDDLKAQKLDLSKIYFKNDKSLTDLSQQVFDDYSVIGTAVLEYITQQIAPKNLDNPSKKEQELIAKKTEKAKYLSLETIKLALEEFNKHRDIDKQCRFEEILANFAAIPMIFDEIAQNKDNLAQISIKYQNQGKKDLLQASAEDDVKAIKDLLDQTNNLLHKLKIFHISQSEDKANILDKDEHFYLVFEECYFELANIVPLYNKIRNYITQKPYSDEKFKLNFENSTLANGWDKNKEPDNTAILFIKDDKYYLGVMNKKNNKIFDDKAIKENKGEGYKKIVYKLLPGANKMLPKVFFSAKSIKFYNPSEDILRIRNHSTHTKNGSPQKGYEKFEFNIEDCRKFIDFYKQSISKHPEWKDFGFRFSDTQRYNSIDEFYREVENQGYKLTFENISESYIDSVVNQGKLYLFQIYNKDFSAYSKGRPNLHTLYWKALFDERNLQDVVYKLNGEAELFYRKQSIPKKITHPAKEAIANKNKDNPKKESVFEYDLIKDKRFTEDKFFFHCPITINFKSSGANKFNDEINLLLKEKANDVHILSIDRGERHLAYYTLVDGKGNIIKQDTFNIIGNDRMKTNYHDKLAAIEKDRDSARKDWKKINNIKEMKEGYLSQVVHEIAKLVIEYNAIVVFEDLNFGFKRGRFKVEKQVYQKLEKMLIEKLNYLVFKDNEFDKTGGVLRAYQLTAPFETFKKMGKQTGIIYYVPAGFTSKICPVTGFVNQLYPKYESVSKSQEFFSKFDKICYNLDKGYFEFSFDYKNFGDKAAKGKWTIASFGSRLINFRNSDKNHNWDTREVYPTKELEKLLKDYSIEYGHGECIKAAICGESDKKFFAKLTSVLNTILQMRNSKTGTELDYLISPVADVNGNFFDSRQAPKNMPQDADANGAYHIGLKGLMLLGRIKNNQEGKKLNLVIKNEEYFEFVQNRNN

SEQ ID NO: 39 - protein, 1310 aa, Helcococcus kunzii
  MISC_FEATURE (1)..(1310): Genbank WP_005398606 Cpf1
MFEKLSNIVSISKTIRFKLIPVGKTLENIEKLGKLEKDFERSDFYPILKNISDDYYRQYIKEKLSDLNLDWQKLYDAHELLDSSKKESQKNLEMIQAQYRKVLFNILSGELDKSGEKNSKDLIKNNKALYGKLFKKQFILEVLPDFVNNNDSYSEEDLEGLNLYSKFTTRLKNFWETRKNVFTDKDIVTAIPFRAVNENFGFYYDNIKIFNKNIEYLENKIPNLENELKEADILDDNRSVKDYFTPNGFNYVITQDGIDVYQAIRGGFTKENGEKVQGINEILNLTQQQLRRKPETKNVKLGVLTKLRKQILEYSESTSFLIDQIEDDNDLVDRINKFNVSFFESTEVSPSLFEQIERLYNALKSIKKEEVYIDARNTQKFSQMLFGQWDVIRRGYTVKITEGSKEEKKKYKEYLELDETSKAKRYLNIREIEELVNLVEGFEEVDVFSVLLEKFKMNNIERSEFEAPIYGSPIKLEAIKEYLEKHLEEYHKWKLLLIGNDDLDTDETFYPLLNEVISDYYIIPLYNLTRNYLTRKHSDKDKIKVNFDFPTLADGWSESKISDNRSIILRKGGYYYLGILIDNKLLINKKNKSKKIYEILIYNQIPEFSKSIPNYPFTKKVKEHFKNNVSDFQLIDGYVSPLIITKEIYDIKKEKKYKKDFYKDNNTNKNYLYTIYKWIEFCKQFLYKYKGPNKESYKEMYDFSTLKDTSLYVNLNDFYADVNSCAYRVLFNKIDENTIDNAVEDGKLLLFQIYNKDFSPESKGKKNLHTLYWLSMFSEENLRTRKLKLNGQAEIFYRKKLEKKPIIHKEGSILLNKIDKEGNTIPENIYHECYRYLNKKIGREDLSDEAIALFNKDVLKYKEARFDIIKDRRYSESQFFFHVPITFNWDIKTNKNVNQIVQGMIKDGEIKHIIGIDRGERHLLYYSVIDLEGNIVEQGSLNTLEQNRFDNSTVKVDYQNKLRTREEDRDRARKNWTNINKIKELKDGYLSHVVHKLSRLIIKYEAIVIMENLNQGFKRGRFKVERQVYQKFELALMNKLSALSFKEKYDERKNLEPSGILNPIQACYPVDAYQELQGQNGIVFYLPAAYTSVIDPVTGFTNLFRLKSINSSKYEEFIKKFKNIYFDNEEEDFKFIFNYKDFAKANLVILNNIKSKDWKISTRGERISYNSKKKEYFYVQPTEFLINKLKELNIDYENIDIIPLIDNLEEKAKRKILKALFDTFKYSVQLRNYDFENDYIISPTADDNGNYYNSNEIDIDKTNLPNNGDANGAFNIARKGLLLKDRIVNSNESKVDLKIKNEDWINFIIS

SEQ ID NO: 40 - protein, 1257 aa, Prevotella bryantii
  MISC_FEATURE (1)..(1257): Genbank WP_006283774 Cpf1
MQINNLKIIYMKFTDFTGLYSLSKTLRFELKPIGKTLENIKKAGLLEQDQHRADSYKKVKKIIDEYHKAFIEKSLSNFELKYQSEDKLDSLEEYLMYYSMKRIEKTEKDKFAKIQDNLRKQIADHLKGDESYKTIFSKDLIRKNLPDFVKSDEERTLIKEFKDFTTYFKGFYENRENMYSAEDKSTAISHRIIHENLPKFVDNINAFSKIILIPELREKLNQIYQDFEEYLNVESIDEIFHLDYFSMVMTQKQIEVYNAIIGGKSTNDKKIQGLNEYINLYNQKHKDCKLPKLKLLFKQILSDRIAISWLPDNFKDDQEALDSIDTCYKNLLNDGNVLGEGNLKLLLENIDTYNLKGIFIRNDLQLTDISQKMYASWNVIQDAVILDLKKQVSRKKKESAEDYNDRLKKLYTSQESFSIQYLNDCLRAYGKTENIQDYFAKLGAVNNEHEQTINLFAQVRNAYTSVQAILTTPYPENANLAQDKETVALIKNLLDSLKRLQRFIKPLLGKGDESDKDERFYGDFTPLWETLNQITPLYNMVRNYMTRKPYSQEKIKLNFENSTLLGGWDLNKEHDNTAIILRKNGLYYLAIMKKSANKIFDKDKLDNSGDCYEKMVYKLLPGANKMLPKVFFSKSRIDEFKPSENIIENYKKGTHKKGANFNLADCHNLIDFFKSSISKHEDWSKFNFHFSDTSSYEDLSDFYREVEQQGYSISFCDVSVEYINKMVEKGDLYLFQIYNKDFSEFSKGTPNMHTLYWNSLFSKENLNNIIYKLNGQAEIFFRKKSLNYKRPTHPAHQAIKNKNKCNEKKESIFDYDLVKDKRYTVDKFQFHVPITMNFKSTGNTNINQQVIDYLRTEDDTHIIGIDRGERHLLYLVVIDSHGKIVEQFTLNEIVNEYGGNIYRTNYHDLLDTREQNREKARESWQTIENIKELKEGYISQVIHKITDLMQKYHAVVVLEDLNMGFMRGRQKVEKQVYQKFEEMLINKLNYLVNKKADQNSAGGLLHAYQLTSKFESFQKLGKQSGFLFYIPAWNTSKIDPVTGFVNLFDTRYESIDKAKAFFGKFDSIRYNADKDWFEFAFDYNNFTTKAEGTRTNWTICTYGSRIRTFRNQAKNSQWDNEEIDLTKAYKAFFAKHGINIYDNIKEAIAMETEKSFFEDLLHLLKLTLQMRNSITGTTTDYLISPVHDSKGNFYDSRICDNSLPANADANGAYNIARKGLMLIQQIKDSTSSNRFKFSPITNKDWLIFAQEKPYLND

SEQ ID NO: 41 - protein, 1262 aa, Bacteroidetes oral
  MISC_FEATURE (1)..(1262): Genbank WP_009217842 Cpf1
MRKFNEFVGLYPISKTLRFELKPIGKTLEHIQRNKLLEHDAVRADDYVKVKKIIDKYHKCLIDEALSGFTFDTEADGRSNNSLSEYYLYYNLKKRNEQEQKTFKTIQNNLRKQIVNKLTQSEKYKRIDKKELITTDLPDFLTNESEKELVEKFKNFTTYFTEFHKNRKNMYSKEEKSTAIAFRLINENLPKFVDNIAAFEKVVSSPLAEKINALYEDFKEYLNVEEISRVFRLDYYDELLTQKQIDLYNAIVGGRTEEDNKIQIKGLNQYINEYNQQQTDRSNRLPKLKPLYKQILSDRESVSWLPPKFDSDKNLLIKIKECYDALSEKEKVFDKLESILKSLSTYDLSKIYISNDSQLSYISQKMFGRWDIISKAIREDCAKRNPQKSRESLEKFAERIDKKLKTIDSISIGDVDECLAQLGETYVKRVEDYFVAMGESEIDDEQTDTTSFKKNIEGAYESVKELLNNADNITDNNLMQDKGNVEKIKTLLDAIKDLQRFIKPLLGKGDEADKDGVFYGEFTSLWTKLDQVTPLYNMVRNYLTSKPYSTKKIKLNFENSTLMDGWDLNKEPDNTTVIFCKDGLYYLGIMGKKYNRVFVDREDLPHDGECYDKMEYKLLPGANKMLPKVFFSETGIQRFLPSEELLGKYERGTHKKGAGFDLGDCRALIDFFKKSIERHDDWKKFDFKFSDTSTYQDISEFYREVEQQGYKMSFRKVSVDYIKSLVEEGKLYLFQIYNKDFSAHSKGTPNMHTLYWKMLFDEENLKDVVYKLNGEAEVFFRKSSITVQSPTHPANSPIKNKNKDNQKKESKFEYDLIKDRRYTVDKFLFHVPITMNFKSVGGSNINQLVKRHIRSATDLHIIGIDRGERHLLYLTVIDSRGNIKEQFSLNEIVNEYNGNTYRTDYHELLDTREGERTEARRNWQTIQNIRELKEGYLSQVIHKISELAIKYNAVIVLEDLNFGFMRSRQKVEKQVYQKFEKMLIDKLNYLVDKKKPVAETGGLLRAYQLTGEFESFKTLGKQSGILFYVPAWNTSKIDPVTGFVNLFDTHYENIEKAKVFFDKFKSIRYNSDKDWFEFVVDDYTRFSPKAEGTRRDWTICTQGKRIQICRNHQRNNEWEGQEIDLTKAFKEHFEAYGVDISKDLREQINTQNKKEFFEELLRLLRLTLQMRNSMPSSDIDYLISPVANDTGCFFDSRKQAELKENAVLPMNADANGAYNIARKGLLAIRKMKQEENDSAKISLAISNKEWLKFAQTKPYLED

SEQ ID NO: 42 - protein, 1318 aa, Flavobacterium branchiophilum
  MISC_FEATURE (1)..(1318): Genbank WP_014085038 Cpf1
MTNKFTNQYSLSKTLRFELIPQGKTLEFIQEKGLLSQDKQRAESYQEMKKTIDKFHKYFIDLALSNAKLTHLETYLELYNKSAETKKEQKFKDDLKKVQDNLRKEIVKSFSDGDAKSIFAILDKKELITVELEKWFENNEQKDIYFDEKFKTFTTYFTGFHQNRKNMYSVEPNSTAIAYRLIHENLPKFLENAKAFEKIKQVESLQVNFRELMGEFGDEGLIFVNELEEMFQINYYNDVLSQNGITIYNSIISGFTKNDIKYKGLNEYINNYNQTKDKKDRLPKLKQLYKQILSDRISLSFLPDAFTDGKQVLKAIFDFYKINLLSYTIEGQEESQNLLLLIRQTIENLSSFDTQKIYLKNDTHLTTISQQVFGDFSVFSTALNYWYETKVNPKFETEYSKANEKKREILDKAKAVFTKQDYFSIAFLQEVLSEYILTLDHTSDIVKKHSSNCIADYFKNHFVAKKENETDKTFDFIANITAKYQCIQGILENADQYEDELKQDQKLIDNLKFFLDAILELLHFIKPLHLKSESITEKDTAFYDVFENYYEALSLLTPLYNMVRNYVTQKPYSTEKIKLNFENAQLLNGWDANKEGDYLTTILKKDGNYFLAIMDKKHNKAFQKFPEGKENYEKMVYKLLPGVNKMLPKVFFSNKNIAYFNPSKELLENYKKETHKKGDTFNLEHCHTLIDFFKDSLNKHEDWKYFDFQFSETKSYQDLSGFYREVEHQGYKINFKNIDSEYIDGLVNEGKLFLFQIYSKDFSPFSKGKPNMHTLYWKALFEEQNLQNVIYKLNGQAEIFFRKASIKPKNIILHKKKIKIAKKHFIDKKTKTSEIVPVQTIKNLNMYYQGKISEKELTQDDLRYIDNFSIFNEKNKTIDIIKDKRFTVDKFQFHVPITMNFKATGGSYINQTVLEYLQNNPEVKIIGLDRGERHLVYLTLIDQQGNILKQESLNTITDSKISTPYHKLLDNKENERDLARKNWGTVENIKELKEGYISQVVHKIATLMLEENAIVVMEDLNFGFKRGRFKVEKQIYQKLEKMLIDKLNYLVLKDKQPQELGGLYNALQLTNKFESFQKMGKQSGFLFYVPAWNTSKIDPTTGFVNYFYTKYENVDKAKAFFEKFEAIRFNAEKKYFEFEVKKYSDFNPKAEGTQQAWTICTYGERIETKRQKDQNNKFVSTPINLTEKIEDFLGKNQIVYGDGNCIKSQIASKDDKAFFETLLYWFKMTLQMRNSETRTDIDYLISPVMNDNGTFYNSRDYEKLENPTLPKDADANGAYHIAKKGLMLLNKIDQADLTKKVDLSISNRDWLQFVQKNK

SEQ ID NO: 43 - protein, 1230 aa, Lachnospiraceae bacterium
  MISC_FEATURE (1)..(1230): Genbank WP_016301126 Cpf1
MHENNGKIADNFIGIYPVSKTLRFELKPVGKTQEYIEKHGILDEDLKRAGDYKSVKKIIDAYHKYFIDEALNGIQLDGLKNYYELYEKKRDNNEEKEFQKIQMSLRKQIVKRFSEHPQYKYLFKKELIKNVLPEFTKDNAEEQTLVKSFQEFTTYFEGFHQNRKNMYSDEEKSTAIAYRVVHQNLPKYIDNMRIFSMILNTDIRSDLTELFNNLKTKMDITIVEEYFAIDGFNKVVNQKGIDVYNTILGAFSTDDNTKIKGLNEYINLYNQKNKAKLPKLKPLFKQILSDRDKISFIPEQFDSDTEVLEAVDMFYNRLLQFVIENEGQITISKLLTNFSAYDLNKIYVKNDTTISAISNDLFDDWSYISKAVRENYDSENVDKNKRAAAYEEKKEKALSKIKMYSIEELNFFVKKYSCNECHIEGYFERRILEILDKMRYAYESCKILHDKGLINNISLCQDRQAISELKDFLDSIKEVQWLLKPLMIGQEQADKEEAFYTELLRIWEELEPITLLYNKVRNYVTKKPYTLEKVKLNFYKSTLLDGWDKNKEKDNLGIILLKDGQYYLGIMNRRNNKIADDAPLAKTDNVYRKMEYKLLTKVSANLPRIFLKDKYNPSEEMLEKYEKGTHLKGENFCIDDCRELIDFFKKGIKQYEDWGQFDFKFSDTESYDDISAFYKEVEHQGYKITFRDIDETYIDSLVNEGKLYLFQIYNKDFSPYSKGTKNLHTLYWEMLFSQQNLQNIVYKLNGNAEIFYRKASINQKDVVVHKADLPIKNKDPQNSKKESMFDYDIIKDKRFTCDKYQFHVPITMNFKALGENHFNRKVNRLIHDAENMHIIGIDRGERNLIYLCMIDMKGNIVKQISLNEIISYDKNKLEHKRNYHQLLKTREDENKSARQSWQTIHTIKELKEGYLSQVIHVITDLMVEYNAIVVLEDLNFGFKQGRQKFERQVYQKFEKMLIDKLNYLVDKSKGMDEDGGLLHAYQLTDEFKSFKQLGKQSGFLYYIPAWNTSKLDPTTGFVNLFYTKYESVEKSKEFINNFTSILYNQEREYFEFLFDYSAFTSKAEGSRLKWTVCSKGERVETYRNPKKNNEWDTQKIDLTFELKKLFNDYSISLLDGDLREQMGKIDKADFYKKFMKLFALIVQMRNSDEREDKLISPVLNKYGAFFETGKNERMPLDADANGAYNIARKGLWIIEKIKNTDVEQLDKVKLTISNKEWLQYAQEHIL

SEQ ID NO: 44 - protein, 1246 aa, Porphyromonas macacae
  MISC_FEATURE (1)..(1246): Genbank WP_018359861 Cpf1
MKTQHFFEDFTSLYSLSKTIRFELKPIGKTLENIKKNGLIRRDEQRLDDYEKLKKVIDEYHEDFIANILSSFSFSEEILQSYIQNLSESEARAKIEKTMRDTLAKAFSEDERYKSIFKKELVKKDIPVWCPAYKSLCKKFDNFTTSLVPFHENRKNLYTSNEITASIPYRIVHVNLPKFIQNIEALCELQKKMGADLYLEMMENLRNVWPSFVKTPDDLCNLKTYNHLMVQSSISEYNRFVGGYSTEDGTKHQGINEWINIYRQRNKEMRLPGLVFLHKQILAKVDSSSFISDTLENDDQVFCVLRQFRKLFWNTVSSKEDDAASLKDLFCGLSGYDPEAIYVSDAHLATISKNIFDRWNYISDAIRRKTEVLMPRKKESVERYAEKISKQIKKRQSYSLAELDDLLAHYSEESLPAGFSLLSYFTSLGGQKYLVSDGEVILYEEGSNIWDEVLIAFRDLQVILDKDFTEKKLGKDEEAVSVIKKALDSALRLRKFFDLLSGTGAEIRRDSSFYALYTDRMDKLKGLLKMYDKVRNYLTKKPYSIEKFKLHFDNPSLLSGWDKNKELNNLSVIFRQNGYYYLGIMTPKGKNLFKTLPKLGAEEMFYEKMEYKQIAEPMLMLPKVFFPKKTKPAFAPDQSVVDIYNKKTFKTGQKGFNKKDLYRLIDFYKEALTVHEWKLFNFSFSPTEQYRNIGEFFDEVREQAYKVSMVNVPASYIDEAVENGKLYLFQIYNKDFSPYSKGIPNLHTLYWKALFSEQNQSRVYKLCGGGELFYRKASLHMQDTTVHPKGISIHKKNLNKKGETSLFNYDLVKDKRFTEDKFFFHVPISINYKNKKITNVNQMVRDYIAQNDDLQIIGIDRGERNLLYISRIDTRGNLLEQFSLNVIESDKGDLRTDYQKILGDREQERLRRRQEWKSIESIKDLKDGYMSQVVHKICNMVVEHKAIVVLENLNLSFMKGRKKVEKSVYEKFERMLVDKLNYLVVDKKNLSNEPGGLYAAYQLTNPLFSFEELHRYPQSGILFFVDPWNTSLTDPSTGFVNLLGRINYTNVGDARKFFDRFNAIRYDGKGNILFDLDLSRFDVRVETQRKLWTLTTFGSRIAKSKKSGKWMVERIENLSLCFLELFEQFNIGYRVEKDLKKAILSQDRKEFYVRLIYLFNLMMQIRNSDGEEDYILSPALNEKNLQFDSRLIEAKDLPVDADANGAYNVARKGLMVVQRIKRGDHESIHRIGRAQWLRYVQEGIVE

SEQ ID NO: 45 - protein, 1259 aa, Synergistes jonesii
  MISC_FEATURE (1)..(1259): Genbank WP_037975888 Type V CV CRISPR-associated protein Cpf1
MANSLKDFTNIYQLSKTLRFELKPIGKTEEHINRKLIIMHDEKRGEDYKSVTKLIDDYHRKFIHETLDPAHFDWNPLAEALIQSGSKNNKALPAEQKEMREKIISMFTSQAVYKKLFKKELFSELLPEMIKSELVSDLEKQAQLDAVKSFDKFSTYFTGFHENRKNIYSKKDTSTSIAFRIVHQNFPKFLANVRAYTLIKERAPEVIDKAQKELSGILGGKTLDDIFSIESFNNVLTQDKIDYYNQIIGGVSGKAGDKKLRGVNEFSNLYRQQHPEVASLRIKMVPLYKQILSDRTTLSFVPEALKDDEQAINAVDGLRSELERNDIFNRIKRLFGKNNLYSLDKIWIKNSSISAFSNELFKNWSFIEDALKEFKENEFNGARSAGKKAEKWLKSKYFSFADIDAAVKSYSEQVSADISSAPSASYFAKFTNLIETAAENGRKFSYFAAESKAFRGDDGKTEIIKAYLDSLNDILHCLKPFETEDISDIDTEFYSAFAEIYDSVKDVIPVYNAVRNYTTQKPFSTEKFKLNFENPALAKGWDKNKEQNNTAIILMKDGKYYLGVIDKNNKLRADDLADDGSAYGYMKMNYKFIPTPHMELPKVFLPKRAPKRYNPSREILLIKENKTFIKDKNFNRTDCHKLIDFFKDSINKHKDWRTFGFDFSDTDSYEDISDFYMEVQDQGYKLTFTRLSAEKIDKWVEEGRLFLFQIYNKDFADGAQGSPNLHTLYWKAIFSEENLKDVVLKLNGEAELFFRRKSIDKPAVHAKGSMKVNRRDIDGNPIDEGTYVEICGYANGKRDMASLNAGARGLIESGLVRITEVKHELVKDKRYTIDKYFFHVPFTINFKAQGQGNINSDVNLFLRNNKDVNIIGIDRGERNLVYVSLIDRDGHIKLQKDFNIIGGMDYHAKLNQKEKERDTARKSWKTIGTIKELKEGYLSQVVHEIVRLAVDNNAVIVMEDLNIGFKRGRFKVEKQVYQKFEKMLIDKLNYLVFKDAGYDAPCGILKGLQLTEKFESFTKLGKQCGIIFYIPAGYTSKIDPTTGFVNLFNINDVSSKEKQKDFIGKLDSIRFDAKRDMFTFEFDYDKFRTYQTSYRKKWAVWTNGKRIVREKDKDGKFRMNDRLLTEDMKNILNKYALAYKAGEDILPDVISRDKSLASEIFYVFKNTLQMRNSKRDTGEDFIISPVLNAKGRFFDSRKTDAALPIDADANGAYHIALKGSLVLDAIDEKLKEDGRIDYKDMAVSNPKWFEFMQTRKFDF

SEQ ID NO: 46 - protein, 1263 aa, Leptospira inadai
  MISC_FEATURE (1)..(1263): Genbank WP_020988726 Cpf1
MEDYSGFVNIYSIQKTLRFELKPVGKTLEHIEKKGFLKKDKIRAEDYKAVKKIIDKYHRAYIEEVFDSVLHQKKKKDKTRFSTQFIKEIKEFSELYYKTEKNIPDKERLEALSEKLRKMLVGAFKGEFSEEVAEKYKNLFSKELIRNEIEKFCETDEERKQVSNFKSFTTYFTGFHSNRQNIYSDEKKSTAIGYRIIHQNLPKFLDNLKIIESIQRRFKDFPWSDLKKNLKKIDKNIKLTEYFSIDGFVNVLNQKGIDAYNTILGGKSEESGEKIQGLNEYINLYRQKNNIDRKNLPNVKILFKQILGDRETKSFIPEAFPDDQSVLNSITEFAKYLKLDKKKKSIIAELKKFLSSFNRYELDGIYLANDNSLASISTFLFDDWSFIKKSVSFKYDESVGDPKKKIKSPLKYEKEKEKWLKQKYYTISFLNDAIESYSKSQDEKRVKIRLEAYFAEFKSKDDAKKQFDLLERIEEAYAIVEPLLGAEYPRDRNLKADKKEVGKIKDFLDSIKSLQFFLKPLLSAEIFDEKDLGFYNQLEGYYEEIDSIGHLYNKVRNYLTGKIYSKEKFKLNFENSTLLKGWDENREVANLCVIFREDQKYYLGVMDKENNTILSDIPKVKPNELFYEKMVYKLIPTPHMQLPRIIFSSDNLSIYNPSKSILKIREAKSFKEGKNFKLKDCHKFIDFYKESISKNEDWSRFDFKFSKTSSYENISEFYREVERQGYNLDFKKVSKFYIDSLVEDGKLYLFQIYNKDFSIFSKGKPNLHTIYFRSLFSKENLKDVCLKLNGEAEMFFRKKSINYDEKKKREGHHPELFEKLKYPILKDKRYSEDKFQFHLPISLNFKSKERLNFNLKVNEFLKRNKDINIIGIDRGERNLLYLVMINQKGEILKQTLLDSMQSGKGRPEINYKEKLQEKEIERDKARKSWGTVENIKELKEGYLSIVIHQISKLMVENNAIVVLEDLNIGFKRGRQKVERQVYQKFEKMLIDKLNFLVFKENKPTEPGGVLKAYQLTDEFQSFEKLSKQTGFLFYVPSWNTSKIDPRTGFIDFLHPAYENIEKAKQWINKFDSIRFNSKMDWFEFTADTRKFSENLMLGKNRVWVICTTNVERYFTSKTANSSIQYNSIQITEKLKELFVDIPFSNGQDLKPEILRKNDAVFFKSLLFYIKTTLSLRQNNGKKGEEEKDFILSPVVDSKGRFFNSLEASDDEPKDADANGAYHIALKGLMNLLVLNETKEENLSRPKWKIKNKDWLEFVWERNR

SEQ ID NO: 47 - protein, 1260 aa, Porphyromonas crevioricanis
  MISC_FEATURE (1)..(1260): Genbank WP_023941260 Cpf1
MDSLKDFTNLYPVSKTLRFELKPVGKTLENIEKAGILKEDEHRAESYRRVKKIIDTYHKVFIDSSLENMAKMGIENEIKAMLQSFCELYKKDHRTEGEDKALDKIRAVLRGLIVGAFTGVCGRRENTVQNEKYESLFKEKLIKEILPDFVLSTEAESLPFSVEEATRSLKEFDSFTSYFAGFYENRKNIYSTKPQSTAIAYRLIHENLPKFIDNILVFQKIKEPIAKELEHIRADFSAGGYIKKDERLEDIFSLNYYIHVLSQAGIEKYNALIGKIVTEGDGEMKGLNEHINLYNQQRGREDRLPLFRPLYKQILSDREQLSYLPESFEKDEELLRALKEFYDHIAEDILGRTQQLMTSISEYDLSRIYVRNDSQLTDISKKMLGDWNAIYMARERAYDHEQAPKRITAKYERDRIKALKGEESISLANLNSCIAFLDNVRDCRVDTYLSTLGQKEGPHGLSNLVENVFASYHEAEQLLSFPYPEENNLIQDKDNVVLIKNLLDNISDLQRFLKPLWGMGDEPDKDERFYGEYNYIRGALDQVIPLYNKVRNYLTRKPYSTRKVKLNFGNSQLLSGWDRNKEKDNSCVILRKGQNFYLAIMNNRHKRSFENKVLPEYKEGEPYFEKMDYKFLPDPNKMLPKVFLSKKGIEIYKPSPKLLEQYGHGTHKKGDTFSMDDLHELIDFFKHSIEAHEDWKQFGFKFSDTATYENVSSFYREVEDQGYKLSFRKVSESYVYSLIDQGKLYLFQIYNKDFSPCSKGTPNLHTLYWRMLFDERNLADVIYKLDGKAEIFFREKSLKNDHPTHPAGKPIKKKSRQKKGEESLFEYDLVKDRRYTMDKFQFHVPITMNFKCSAGSKVNDMVNAHIREAKDMHVIGIDRGERNLLYICVIDSRGTILDQISLNTINDIDYHDLLESRDKDRQQERRNWQTIEGIKELKQGYLSQAVHRIAELMVAYKAVVALEDLNMGFKRGRQKVESSVYQQFEKQLIDKLNYLVDKKKRPEDIGGLLRAYQFTAPFKSFKEMGKQNGFLFYIPAWNTSNIDPTTGFVNLFHAQYENVDKAKSFFQKFDSISYNPKKDWFEFAFDYKNFTKKAEGSRSMWILCTHGSRIKNFRNSQKNGQWDSEEFALTEAFKSLFVRYEIDYTADLKTAIVDEKQKDFFVDLLKLFKLTVQMRNSWKEKDLDYLISPVAGADGRFFDTREGNKSLPKDADANGAYNIALKGLWALRQIRQTSEGGKLKLAISNKEWLQFVQERSYEKD

SEQ ID NO: 48 - protein, 1253 aa, Prevotella albensis
  MISC_FEATURE (1)..(1253): Genbank WP_024988992 Cpf1
MNIKNFTGLYPLSKTLRFELKPIGKTKENIEKNGILTKDEQRAKDYLIVKGFIDEYHKQFIKDRLWDFKLPLESEGEKNSLEEYQELYELTKRNDAQEADFTEIKDNLRSSITEQLTKSGSAYDRIFKKEFIREDLVNFLEDEKDKNIVKQFEDFTTYFTGFYENRKNMYSSEEKSTAIAYRLIHQNLPKFMDNMRSFAKIANSSVSEHFSDIYESWKEYLNVNSIEEIFQLDYFSETLTQPHIEVYNYIIGKKVLEDGTEIKGINEYVNLYNQQQKDKSKRLPFLVPLYKQILSDREKLSWIAEEFDSDKKMLSAITESYNHLHNVLMGNENESLRNLLLNIKDYNLEKINITNDLSLTEISQNLFGRYDVFTNGIKNKLRVLTPRKKKETDENFEDRINKIFKTQKSFSIAFLNKLPQPEMEDGKPRNIEDYFITQGAINTKSIQKEDIFAQIENAYEDAQVFLQIKDTDNKLSQNKTAVEKIKTLLDALKELQHFIKPLLGSGEENEKDELFYGSFLAIWDELDTITPLYNKVRNWLTRKPYSTEKIKLNFDNAQLLGGWDVNKEHDCAGILLRKNDSYYLGIINKKTNHIFDTDITPSDGECYDKIDYKLLPGANKMLPKVFFSKSRIKEFEPSEAIINCYKKGTHKKGKNFNLTDCHRLINFFKTSIEKHEDWSKFGFKFSDTETYEDISGFYREVEQQGYRLTSHPVSASYIHSLVKEGKLYLFQIWNKDFSQFSKGTPNLHTLYWKMLFDKRNLSDVVYKLNGQAEVFYRKSSIEHQNRIIHPAQHPITNKNELNKKHTSTFKYDIIKDRRYTVDKFQFHVPITINFKATGQNNINPIVQEVIRQNGITHIIGIDRGERHLLYLSLIDLKGNIIKQMTLNEIINEYKGVTYKTNYHNLLEKREKERTEARHSWSSIESIKELKDGYMSQVIHKITDMMVKYNAIVVLEDLNGGFMRGRQKVEKQVYQKFEKKLIDKLNYLVDKKLDANEVGGVLNAYQLTNKFESFKKIGKQSGFLFYIPAWNTSKIDPITGFVNLFNTRYESIKETKVFWSKFDIIRYNKEKNWFEFVFDYNTFTTKAEGTRTKWTLCTHGTRIQTFRNPEKNAQWDNKEINLTESFKALFEKYKIDITSNLKESIMQETEKKFFQELHNLLHLTLQMRNSVTGTDIDYLISPVADEDGNFYDSRINGKNFPENADANGAYNIARKGLMLIRQIKQADPQKKFKFETITNKDWLKFAQDKPYLKD

SEQ ID NO: 49 - protein, 1231 aa, Butyrivibrio fibrisolvens
  MISC_FEATURE (1)..(1231): Genbank WP_027216152 Cpf1
MYYESLTKLYPIKKTIRNELVPIGKTLENIKKNNILEADEDRKIAYIRVKAIMDDYHKRLINEALSGFALIDLDKAANLYLSRSKSADDIESFSRFQDKLRKAIAKRLREHENFGKIGNKDIIPLLQKLSENEDDYNALESFKNFYTYFESYNDVRLNLYSDKEKSSTVAYRLINENLPRFLDNIRAYDAVQKAGITSEELSSEAQDGLFLVNTFNNVLIQDGINTYNEDIGKLNVAINLYNQKNASVQGFRKVPKMKVLYKQILSDREESFIDEFESDTELLDSLESHYANLAKYFGSNKVQLLFTALRESKGVNVYVKNDIAKTSFSNVVFGSWSRIDELINGEYDDNNNRKKDEKYYDKRQKELKKNKSYTIEKIITLSTEDVDVIGKYIEKLESDIDDIRFKGKNFYEAVLCGHDRSKKLSKNKGAVEAIKGYLDSVKDFERDLKLINGSGQELEKNLVVYGEQEAVLSELSGIDSLYNMTRNYLTKKPFSTEKIKLNFNKPTFLDGWDYGNEEAYLGFFMIKEGNYFLAVMDANWNKEFRNIPSVDKSDCYKKVIYKQISSPEKSIQNLMVIDGKTVKKNGRKEKEGIHSGENLILEELKNTYLPKKINDIRKRRSYLNGDTFSKKDLTEFIGYYKQRVIEYYNGYSFYFKSDDDYASFKEFQEDVGRQAYQISYVDVPVSFVDDLINSGKLYLFRVYNKDFSEYSKGRLNLHTLYFKMLFDERNLKNVVYKLNGQAEVFYRPSSIKKEELIVHRAGEEIKNKNPKRAAQKPTRRLDYDIVKDRRYSQDKFMLHTSIIMNFGAEENVSFNDIVNGVLRNEDKVNVIGIDRGERNLLYVVVIDPEGKILEQRSLNCITDSNLDIETDYHRLLDEKESDRKIARRDWTTIENIKELKAGYLSQVVHIVAELVLKYNAIICLEDLNFGFKRGRQKVEKQVYQKFEKMLIDKLNYLVMDKSREQLSPEKISGALNALQLTPDFKSFKVLGKQTGIIYYVPAYLTSKIDPMTGFANLFYVKYENVDKAKEFFSKFDSIKYNKDGKNWNTKGYFEFAFDYKKFTDRAYGRVSEWTVCTVGERIIKFKNKEKNNSYDDKVIDLTNSLKELFDSYKVTYESEVDLKDAILAIDDPAFYRDLTRRLQQTLQMRNSSCDGSRDYIISPVKNSKGEFFCSDNNDDTTPNDADANGAFNIARKGLWVLNEIRNSEEGSKINLAMSNAQWLEYAQDNTI

SEQ ID NO: 50 - protein, 1235 aa, Anaerovibrio sp.
  MISC_FEATURE (1)..(1235): Genbank WP_027407524 Cpf1
MVAFIDEFVGQYPVSKTLRFEARPVPETKKWLESDQCSVLFNDQKRNEYYGVLKELLDDYYRAYIEDALTSFTLDKALLENAYDLYCNRDTNAFSSCCEKLRKDLVKAFGNLKDYLLGSDQLKDLVKLKAKVDAPAGKGKKKIEVDSRLINWLNNNAKYSAEDREKYIKAIESFEGFVTYLTNYKQARENMFSSEDKSTAIAFRVIDQNMVTYFGNIRIYEKIKAKYPELYSALKGFEKFFSPTAYSEILSQSKIDEYNYQCIGRPIDDADFKGVNSLINEYRQKNGIKARELPVMSMLYKQILSDRDNSFMSEVINRNEEAIECAKNGYKVSYALFNELLQLYKKIFTEDNYGNIYVKTQPLTELSQALFGDWSILRNALDNGKYDKDIINLAELEKYFSEYCKVLDADDAAKIQDKFNLKDYFIQKNALDATLPDLDKITQYKPHLDAMLQAIRKYKLFSMYNGRKKMDVPENGIDFSNEFNAIYDKLSEFSILYDRIRNFATKKPYSDEKMKLSFNMPTMLAGWDYNNETANGCFLFIKDGKYFLGVADSKSKNIFDFKKNPHLLDKYSSKDIYYKVKYKQVSGSAKMLPKVVFAGSNEKIFGHLISKRILEIREKKLYTAAAGDRKAVAEWIDFMKSAIAIHPEWNEYFKFKFKNTAEYDNANKFYEDIDKQTYSLEKVEIPTEYIDEMVSQHKLYLFQLYTKDFSDKKKKKGTDNLHTMYWHGVFSDENLKAVTEGTQPIIKLNGEAEMFMRNPSIEFQVTHEHNKPIANKNPLNTKKESVFNYDLIKDKRYTERKFYFHCPITLNFRADKPIKYNEKINRFVENNPDVCIIGIDRGERHLLYYTVINQTGDILEQGSLNKISGSYTNDKGEKVNKETDYHDLLDRKEKGKHVAQQAWETIENIKELKAGYLSQVVYKLTQLMLQYNAVIVLENLNVGFKRGRTKVEKQVYQKFEKAMIDKLNYLVFKDRGYEMNGSYAKGLQLTDKFESFDKIGKQTGCIYYVIPSYTSHIDPKTGFVNLLNAKLRYENITKAQDTIRKFDSISYNAKADYFEFAFDYRSFGVDMARNEWVVCTCGDLRWEYSAKTRETKAYSVTDRLKELFKAHGIDYVGGENLVSHITEVADKHFLSTLLFYLRLVLKMRYTVSGTENENDFILSPVEYAPGKFFDSREATSTEPMNADANGAYHIALKGLMTIRGIEDGKLHNYGKGGENAAWFKFMQNQEYKNNG

SEQ ID NO: 51 - protein, 1205 aa, Pseudobutyrivibrio ruminis
  MISC_FEATURE (1)..(1205): Genbank WP_028248456 Cpf1
MYYQNLTKMYPISKTLRNELIPVGKTLENIRKNGILEADIQRKADYEHVKKLMDNYHKQLINEALQGVHLSDLSDAYDLYFNLSKEKNSVDAFSKCQDKLRKEIVSLLKNHENFPKIGNKEIIKLLQSLYDNDTDYKALDSFSNFYTYFSSYNEVRKNLYSDEEKSSTVAYRLINENLPKFLDNIKAYAIAKKAGVRAEGLSEEDQDCLFIIETFERTLTQDGIDNYNAAIGKLNTAINLFNQQNKKQEGFRKVPQMKCLYKQILSDREEAFIDEFSDDEDLITNIESFAENMNVFLNSEIITDFKIALVESDGSLVYIKNDVSKTSFSNIVFGSWNAIDEKLSDEYDLANSKKKKDEKYYEKRQKELKKNKSYDLETIIGLFDDNSDVIGKYIEKLESDITAIAEAKNDFDEIVLRKHDKNKSLRKNTNAVEAIKSYLDTVKDFERDIKLINGSGQEVEKNLVVYAEQENILAEIKNVDSLYNMSRNYLTQKPFSTEKFKLNFNRATLLNGWDKNKETDNLGILFEKDGMYYLGIMNTKANKIFVNIPKATSNDVYHKVNYKLLPGPNKMLPKVFFAQSNLDYYKPSEELLAKYKAGTHKKGDNFSLEDCHALIDFFKASIEKHPDWSSFGFEFSETCTYEDLSGFYREVEKQGYKITYTDVDADYITSLVERDELYLFQIYNKDFSPYSKGNLNLHTIYLQMLFDQRNLNNVVYKLNGEAEVFYRPASINDEEVIIHKAGEEIKNKNSKRAVDKPTSKFGYDIIKDRRYSKDKFMLHIPVTMNFGVDETRRFNDVVNDALRNDEKVRVIGIDRGERNLLYVVVVDTDGTILEQISLNSIINNEYSIETDYHKLLDEKEGDRDRARKNWTTIENIKELKEGYLSQVVNVIAKLVLKYNAIICLEDLNFGFKRGRQKVEKQVYQKFEKMLIDKLNYLVIDKSRKQDKPEEFGGALNALQLTSKFTSFKDMGKQTGIIYYVPAYLTSKIDPTTGFANLFYVKYENVEKAKEFFSRFDSISYNNESGYFEFAFDYKKFTDRACGARSQWTVCTYGERIIKFRNTEKNNSFDDKTIVLSEEFKELFSIYGISYEDGAELKNKIMSVDEADFFRSLTRLFQQTMQMRNSSNDVTRDYIISPIMNDRGEFFNSEACDASKPKDADANGAFNIARKGLWVLEQIRNTPSGDKLNLAMSNAEWLEYAQRNQI

SEQ ID NO: 52 - protein, 1154 aa, Proteocatella sphenisci
  MISC_FEATURE (1)..(1154): Genbank WP_028830240 Cpf1
MENFKNLYPINKTLRFELRPYGKTLENFKKSGLLEKDAFKANSRRSMQAIIDEKFKETIEERLKYTEFSECDLGNMTSKDKKITDKAATNLKKQVILSFDDEIFNNYLKPDKNIDALFKNDPSNPVISTFKGFTTYFVNFFEIRKHIFKGESSGSMAYRIIDENLTTYLNNIEKIKKLPEELKSQLEGIDQIDKLNNYNEFITQSGITHYNEIIGGISKSENVKIQGINEGINLYCQKNKVKLPRLTPLYKMILSDRVSNSFVLDTIENDTELIEMISDLINKTEISQDVIMSDIQNIFIKYKQLGNLPGISYSSIVNAICSDYDNNFGDGKRKKSYENDRKKHLETNVYSINYISELLTDTDVSSNIKMRYKELEQNYQVCKENFNATNWMNIKNIKQSEKTNLIKDLLDILKSIQRFYDLFDIVDEDKNPSAEFYTWLSKNAEKLDFEFNSVYNKSRNYLTRKQYSDKKIKLNFDSPTLAKGWDANKEIDNSTIIMRKFNNDRGDYDYFLGIWNKSTPANEKIIPLEDNGLFEKMQYKLYPDPSKMLPKQFLSKIWKAKHPTTPEFDKKYKEGRHKKGPDFEKEFLHELIDCFKHGLVNHDEKYQDVFGFNLRNTEDYNSYTEFLEDVERCNYNLSFNKIADTSNLINDGKLYVFQIWSKDFSIDSKGTKNLNTIYFESLFSEENMIEKMFKLSGEAEIFYRPASLNYCEDIIKKGHHHAELKDKFDYPIIKDKRYSQDKFFFHVPMVINYKSEKLNSKSLNNRTNENLGQFTHIIGIDRGERHLIYLTVVDVSTGEIVEQKHLDEIINTDTKGVEHKTHYLNKLEEKSKTRDNERKSWEAIETIKELKEGYISHVINEIQKLQEKYNALIVMENLNYGFKNSRIKVEKQVYQKFETALIKKFNYIIDKKDPETYIHGYQLTNPITTLDKIGNQSGIVLYIPAWNTSKIDPVTGFVNLLYADDLKYKNQEQAKSFIQKIDNIYFENGEFKFDIDFSKWNNRYSISKTKWTLTSYGTRIQTFRNPQKNNKWDSAEYDLTEEFKLILNIDGTLKSQDVETYKKFMSLFKLMLQLRNSVTGTDIDYMISPVTDKTGTHFDSRENIKNLPADADANGAYNIARKGIMAIENIMNGISDPLKISNEDYLKYIQNQQE

SEQ ID NO: 53 - protein, 1206 aa, Butyrivibrio sp.
  MISC_FEATURE (1)..(1206): Genbank WP_035798880 Cpf1
MYYQNLTKKYPVSKTIRNELIPIGKTLENIRKNNILESDVKRKQDYEHVKGIMDEYHKQLINEALDNYMLPSLNQAAEIYLKKHVDVEDREEFKKTQDLLRREVTGRLKEHENYTKIGKKDILDLLEKLPSISEEDYNALESFRNFYTYFTSYNKVRENLYSDEEKSSTVAYRLINENLPKFLDNIKSYAFVKAAGVLADCIEEEEQDALFMVETFNMTLTQEGIDMYNYQIGKVNSAINLYNQKNHKVEEFKKIPKMKVLYKQILSDREEVFIGEFKDDETLLSSIGAYGNVLMTYLKSEKINIFFDALRESEGKNVYVKNDLSKTTMSNIVFGSWSAFDELLNQEYDLANENKKKDDKYFEKRQKELKKNKSYTLEQMSNLSKEDISPIENYIERISEDIEKICIYNGEFEKIVVNEHDSSRKLSKNIKAVKVIKDYLDSIKELEHDIKLINGSGQELEKNLVVYVGQEEALEQLRPVDSLYNLTRNYLTKKPFSTEKVKLNFNKSTLLNGWDKNKETDNLGILFFKDGKYYLGIMNTTANKAFVNPPAAKTENVFKKVDYKLLPGSNKMLPKVFFAKSNIGYYNPSTELYSNYKKGTHKKGPSFSIDDCHNLIDFFKESIKKHEDWSKFGFEFSDTADYRDISEFYREVEKQGYKLTFTDIDESYINDLIEKNELYLFQIYNKDFSEYSKGKLNLHTLYFMMLFDQRNLDNVVYKLNGEAEVFYRPASIAENELVIHKAGEGIKNKNPNRAKVKETSTFSYDIVKDKRYSKYKFTLHIPITMNFGVDEVRRFNDVINNALRTDDNVNVIGIDRGERNLLYVVVINSEGKILEQISLNSIINKEYDIETNYHALLDEREDDRNKARKDWNTIENIKELKTGYLSQVVNVVAKLVLKYNAIICLEDLNFGFKRGRQKVEKQVYQKFEKMLIEKLNYLVIDKSREQVSPEKMGGALNALQLTSKFKSFAELGKQSGIIYYVPAYLTSKIDPTTGFVNLFYIKYENIEKAKQFFDGFDFIRFNKKDDMFEFSFDYKSFTQKACGIRSKWIVYTNGERIIKYPNPEKNNLFDEKVINVTDEIKGLFKQYRIPYENGEDIKEIIISKAEADFYKRLFRLLHQTLQMRNSTSDGTRDYIISPVKNDRGEFFCSEFSEGTMPKDADANGAYNIARKGLWVLEQIRQKDEGEKVNLSMTNAEWLKYAQLHLL

SEQ ID NO: 54 - protein, 1264 aa, Moraxella caprae
  MISC_FEATURE (1)..(1264): Genbank WP_036388671 Cpf1
MLFQDFTHLYPLSKTMRFELKPIGKTLEHIHAKNFLSQDETMADMYQKVKAILDDYHRDFIADMMGEVKLTKLAEFYDVYLKFRKNPKDDGLQKQLKDLQAVLRKEIVKPIGNGGKYKAGYDRLFGAKLFKDGKELGDLAKFVIAQEGESSPKLAHLAHFEKFSTYFTGFHDNRKNMYSDEDKHTAITYRLIHENLPRFIDNLQILATIKQKHSALYDQIINELTASGLDVSLASHLDGYHKLLTQEGITAYNTLLGGISGEAGSRKIQGINELINSHHNQHCHKSERIAKLRPLHKQILSDGMGVSFLPSKFADDSEMCQAVNEFYRHYADVFAKVQSLFDGFDDHQKDGIYVEHKNLNELSKQAFGDFALLGRVLDGYYVDVVNPEFNERFAKAKTDNAKAKLTKEKDKFIKGVHSLASLEQAIEHYTARHDDESVQAGKLGQYFKHGLAGVDNPIQKIHNNHSTIKGFLERERPAGERALPKIKSGKNPEMTQLRQLKELLDNALNVAHFAKLLTTKTTLDNQDGNFYGEFGALYDELAKIPTLYNKVRDYLSQKPFSTEKYKLNFGNPTLLNGWDLNKEKDNFGIILQKDGCYYLALLDKAHKKVFDNAPNTGKNVYQKMIYKLLPGPNKMLPKVFFAKSNLDYYNPSAELLDKYAQGTHKKGNNFNLKDCHALIDFFKAGINKHPEWQHFGFKFSPTSSYQDLSDFYREVEPQGYQVKFVDINADYINELVEQGQLYLFQIYNKDFSPKAHGKPNLHTLYFKALFSKDNLANPIYKLNGEAQIFYRKASLDMNETTIHRAGEVLENKNPDNPKKRQFVYDIIKDKRYTQDKFMLHVPITMNFGVQGMTIKEFNKKVNQSIQQYDEVNVIGIDRGERHLLYLTVINSKGEILEQRSLNDITTASANGTQMTTPYHKILDKREIERLNARVGWGEIETIKELKSGYLSHVVHQISQLMLKYNAIVVLEDLNFGFKRGRFKVEKQIYQNFENALIKKLNHLVLKDEADDEIGSYKNALQLTNNFTDLKSIGKQTGFLFYVPAWNTSKIDPETGFVDLLKPRYENIAQSQAFFGKFDKICYNADKDYFEFHIDYAKFTDKAKNSRQIWKICSHGDKRYVYDKTANQNKGATKGINVNDELKSLFARHHINDKQPNLVMDICQNNDKEFHKSLIYLLKTLLALRYSNASSDEDFILSPVANDEGMFFNSALADDTQPQNADANGAYHIALKGLWVLEQIKNSDDLNKVKLAIDNQTWLNFAQNR

SEQ ID NO: 55 - protein, 1259 aa, Synergistes jonesii; identical to SEQ ID NO: 45
  MISC_FEATURE (1)..(1259): Genbank WP_037975888 Cpf1

SEQ ID NO: 56 - protein, 1264 aa, Prevotella brevis
  MISC_FEATURE (1)..(1264): Genbank WP_044110123 Cpf1
MKQFTNLYQLSKTLRFELKPIGKTLEHINANGFIDNDAHRAESYKKVKKLIDDYHKDYIENVLNNFKLNGEYLQAYFDLYSQDTKDKQFKDIQDKLRKSIASALKGDDRYKTIDKKELIRQDMKTFLKKDTDKALLDEFYEFTTYFTGYHENRKNMYSDEAKSTAIAYRLIHDNLPKFIDNIAVFKKIANTSVADNFSTIYKNFEEYLNVNSIDEIFSLDYYNIVLTQTQIEVYNSIIGGRTLEDDTKIQGINEFVNLYNQQLANKKDRLPKLKPLFKQILSDRVQLSWLQEEFNTGADVLNAVKEYCTSYFDNVEESVKVLLTGISDYDLSKIYITNDLALTDVSQRMFGEWSIIPNAIEQRLRSDNPKKTNEKEEKYSDRISKLKKLPKSYSLGYINECISELNGIDIADYYATLGAINTESKQEPSIPTSIQVHYNALKPILDTDYPREKNLSQDKLTVMQLKDLLDDFKALQHFIKPLLGNGDEAEKDEKFYGELMQLWEVIDSITPLYNKVRNYCTRKPFSTEKIKVNFENAQLLDGWDENKESTNASIILRKNGMYYLGIMKKEYRNILTKPMPSDGDCYDKVVYKFFKDITTMVPKCTTQMKSVKEHFSNSNDDYTLFEKDKFIAPVVITKEIFDLNNVLYNGVKKFQIGYLNNTGDSFGYNHAVEIWKSFCLKFLKAYKSTSIYDFSSIEKNIGCYNDLNSFYGAVNLLLYNLTYRKVSVDYIHQLVDEDKMYLFMIYNKDFSTYSKGTPNMHTLYWKMLFDESNLNDVVYKLNGQAEVFYRKKSITYQHPTHPANKPIDNKNVNNPKKQSNFEYDLIKDKRYTVDKFMFHVPITLNFKGMGNGDINMQVREYIKTTDDLHFIGIDRGERHLLYICVINGKGEIVEQYSLNEIVNNYKGTEYKTDYHTLLSERDKKRKEERSSWQTIEGIKELKSGYLSQVIHKITQLMIKYNAIVLLEDLNMGFKRGRQKVESSVYQQFEKALIDKLNYLVDKNKDANEIGGLLHAYQLTNDPKLPNKNSKQSGFLFYVPAWNTSKIDPVTGFVNLLDTRYENVAKAQAFFKKFDSIRYNKEYDRFEFKFDYSNFTAKAEDTRTQWTLCTYGTRIETFRNAEKNSNWDSREIDLTTEWKTLFTQHNIPLNANLKEAILLQANKNFYTDILHLMKLTLQMRNSVTGTDIDYMVSPVANECGEFFDSRKVKEGLPVNADANGAYNIARKGLWLAQQIKNANDLSDVKLAITNKEWLQFAQKKQYLKD

SEQ ID NO: 57 - protein, 1273 aa, Flavobacterium sp.
  MISC_FEATURE (1)..(1273): Genbank WP_045971446 Cpf1
MKNFSNLYQVSKTVRFELKPIGNTLENIKNKSLLKNDSIRAESYQKMKKTIDEFHKYFIDLALNNKKLSYLNEYIALYTQSAEAKKEDKFKADFKKVQDNLRKEIVSSFTEGEAKAIFSVLDKKELITIELEKWKNENNLAVYLDESFKSFTTYFTGFHQNRKNMYSAEANSTAIAYRLIHENLPKFIENSKAFEKSSQIAELQPKIEKLYKEFEAYLNVNSISELFEIDYFNEVLTQKGITVYNNIIGGRTATEGKQKIQGLNEIINLYNQTKPKNERLPKLKQLYKQILSDRISLSFLPDAFTEGKQVLKAVFEFYKINLLSYKQDGVEESQNLLELIQQVVKNLGNQDVNKIYLKNDTSLTTIAQQLFGDFSVFSAALQYRYETVVNPKYTAEYQKANEAKQEKLDKEKIKFVKQDYFSIAFLQEVVADYVKTLDENLDWKQKYTPSCIADYFTTHFIAKKENEADKTFNFIANIKAKYQCIQGILEQADDYEDELKQDQKLIDNIKFFLDAILEVVHFIKPLHLKSESITEKDNAFYDVFENYYEALNVVTPLYNMVRNYVTQKPYSTEKIKLNFENAQLLNGWDANKEKDYLTTILKRDGNYFLAIMDKKHNKTFQQFTEDDENYEKIVYKLLPGVNKMLPKVFFSNKNIAFFNPSKEILDNYKNNTHKKGATFNLKDCHALIDFFKDSLNKHEDWKYFDFQFSETKTYQDLSGFYKEVEHQGYKINFKKVSVSQIDTLIEEGKMYLFQIYNKDFSPYAKGKPNMHTLYWKALFETQNLENVIYKLNGQAEIFFRKASIKKKNIITHKAHQPIAAKNPLTPTAKNTFAYDLIKDKRYTVDKFQFHVPITMNFKATGNSYINQDVLAYLKDNPEVNIIGLDRGERHLVYLTLIDQKGTILLQESLNVIQDEKTHTPYHTLLDNKEIARDKARKNWGSIESIKELKEGYISQVVHKITKMMIEHNAIVVMEDLNFGFKRGRFKVEKQIYQKLEKMLIDKLNYLVLKDKQPHELGGLYNALQLTNKFESFQKMGKQSGFLFYVPAWNTSKIDPTTGFVNYFYTKYENVEKAKTFFSKFDSILYNKTKGYFEFVVKNYSDFNPKAADTRQEWTICTHGERIETKRQKEQNNNFVSTTIQLTEQFVNFFEKVGLDLSKELKTQLIAQNEKSFFEELFHLLKLTLQMRNSESHTEIDYLISPVANEKGIFYDSRKATASLPIDADANGAYHIAKKGLWIMEQINKTNSEDDLKKVKLAISNREWLQYVQQVQKK

SEQ ID NO: 58 - protein, 973 aa, Sneathia amnii
  MISC_FEATURE (1)..(973): Genbank WP_046328599 Cpf1
MTEEDTKSFVDEILLTPESVIKTIDNFIDSIIMNDIEGLKEEFLKISLENFEGIYISNKKLNEISNRKFGDYNSINMMIKQSMNEKGILSKKEINELIPDLENINKPKVKSFNLSFIFENLTKEHKELIIDYIRENICNVIENVKITIEKYRNIDNKIEFKNNAEKVSKIKEMLESINELCKLIKEFNTDEIEKNNEFYNILNKNFEIFESSYKVLNKVRNFVTKKEVIENKMKLNFSNYQLGNGWHKNKEKDCSIILFRKRNNERWIYYLGILKHGTKIKENDYLSSVDTGFYKMDYYAQNSLSKMIPKCSITVKNVKNAPEDESVILNDSKKFNEPLEITPEIRKLYGNNEHIKGDKFKKESLVKWIDFCKEFLLKYKSFEKAKKEILKLKESNLYENLEEFYSDAEEKAYFLEFINIDEDKIKKLVKEKNLYLFQIYNKDFSAYSTGNKNLHTMYFEELFTDENLKKPVFKLNGNTEVFYRIASSKPKIVHNKGEKLVNKTYLDDGIIKTIPDSVYEEISEKVKNNEDYSKLLEENNIKNLEIKVATHEIVKDKRYFENKFLFYLPITLNKKVSNKNTNKNINKNVIDEIKDCNEYNVIGIDRGERNLISLCIINQNGEIILQKEMNIIQSSDKYNVDYNEKLEIKSKERDNAKKNWSEIGKIKDLKSGYLSAVVHEIVKLAIEYNAVIILEDLNNGFKNSRKKVDKQIYQKFERALIEKLQFLIFKNYDKNEKGGLRNAFQLTPELKNITKVASQQGIIIYTNPAYTSKIDPTTGYANIIKKSNNNEESIVKAIDKISYDKEKDMFYFDINLSNSSFNLTVKNVLKKEWRIYTNGERIIYKDRKYITLNITQEMKDILSKCGIDYLNIDNLKQDILKNKLHKKVYYIFELANKMRNENKDVDYIISPVLNKDGKFFMTQEINELTPKDADLNGAYNIALKGKLMIDNLNKKEKFVFLSNEDWLNFIQGR

SEQ ID NO: 59 - protein, 1238 aa, Candidatus Methanoplasma
  MISC_FEATURE (1)..(1238): Genbank WP_048112740 Cpf1
MNNYDEFTKLYPIQKTIRFELKPQGRTMEHLETFNFFEEDRDRAEKYKILKEAIDEYHKKFIDEHLTNMSLDWNSLKQISEKYYKSREEKDKKVFLSEQKRMRQEIVSEFKKDDRFKDLFSKKLFSELLKEEIYKKGNHQEIDALKSFDKFSGYFIGLHENRKNMYSDGDEITAISNRIVNENFPKFLDNLQKYQEARKKYPEWIIKAESALVAHNIKMDEVFSLEYFNKVLNQEGIQRYNLALGGYVTKSGEKMMGLNDALNLAHQSEKSSKGRIHMTPLFKQILSEKESFSYIPDVFTEDSQLLPSIGGFFAQIENDKDGNIFDRALELISSYAEYDTERIYIRQADINRVSNVIFGEWGTLGGLMREYKADSINDINLERTCKKVDKWLDSKEFALSDVLEAIKRTGNNDAFNEYISKMRTAREKIDAARKEMKFISEKISGDEESIHIIKTLLDSVQQFLHFFNLFKARQDIPLDGAFYAEFDEVHSKLFAIVPLYNKVRNYLTKNNLNTKKIKLNFKNPTLANGWDQNKVYDYASLIFLRDGNYYLGIINPKRKKNIKFEQGSGNGPFYRKMVYKQIPGPNKNLPRVFLTSTKGKKEYKPSKEIIEGYEADKHIRGDKFDLDFCHKLIDFFKESIEKHKDWSKFNFYFSPTESYGDISEFYLDVEKQGYRMHFENISAETIDEYVEKGDLFLFQIYNKDFVKAATGKKDMHTIYWNAAFSPENLQDVVVKLNGEAELFYRDKSDIKEIVHREGEILVNRTYNGRTPVPDKIHKKLTDYHNGRTKDLGEAKEYLDKVRYFKAHYDITKDRRYLNDKIYFHVPLTLNFKANGKKNLNKMVIEKFLSDEKAHIIGIDRGERNLLYYSIIDRSGKIIDQQSLNVIDGFDYREKLNQREIEMKDARQSWNAIGKIKDLKEGYLSKAVHEITKMAIQYNAIVVMEELNYGFKRGRFKVEKQIYQKFENMLIDKMNYLVFKDAPDESPGGVLNAYQLTNPLESFAKLGKQTGILFYVPAAYTSKIDPTTGFVNLFNTSSKTNAQERKEFLQKFESISYSAKDGGIFAFAFDYRKFGTSKTDHKNVWTAYTNGERMRYIKEKKRNELFDPSKEIKEALTSSGIKYDGGQNILPDILRSNNNGLIYTMYSSFIAAIQMRVYDGKEDYIISPIKNSKGEFFRTDPKRRELPIDADANGAYNIALRGELTMRAIAEKFDPDSEKMAKLELKHKDWFEFMQTRGD

SEQ ID NO: 60 - protein, 1222 aa, Oribacterium sp.
  MISC_FEATURE (1)..(1222): Genbank WP_049895985 Cpf1
METEILKYDFFEREGKYMYYDGLTKQYALSKTIRNELVPIGKTLDNIKKNRILEADIKRKSDYEHVKKLMDMYHKKIINEALDNFKLSVLEDAADIYFNKQNDERDIDAFLKIQDKLRKEIVEQLKGHTDYSKVGNKDFLGLLKAASTEEDRILIESFDNFYTYFTSYNKVRSNLYSAEDKSSTVAYRLINENLPKFFDNIKAYRTVRNAGVISGDMSIVEQDELFEVDTFNHTLTQYGIDTYNHMIGQLNSAINLYNQKMHGAGSFKKLPKMKELYKQLLTEREEEFIEEYTDDEVLITSVHNYVSYLIDYLNSDKVESFFDTLRKSDGKEVFIKNDVSKTTMSNILFDNWSTIDDLINHEYDSAPENVKKTKDDKYFEKRQKDLKKNKSYSLSKIAALCRDTTILEKYIRRLVDDIEKIYTSNNVFSDIVLSKHDRSKKLSKNTNAVQAIKNMLDSIKDFEHDVMLINGSGQEIKKNLNVYSEQEALAGILRQVDHIYNLTRNYLTKKPFSTEKIKLNFNRPTFLDGWDKNKEEANLGILLIKDNRYYLGIMNTSSNKAFVNPPKAISNDIYKKVDYKLLPGPNKMLPKVFFATKNIAYYAPSEELLSKYRKGTHKKGDSFSIDDCRNLIDFFKSSINKNTDWSTFGFNFSDTNSYNDISDFYREVEKQGYKLSFTDIDACYIKDLVDNNELYLFQIYNKDFSPYSKGKLNLHTLYFKMLFDQRNLDNVVYKLNGEAEVFYRPASIESDEQIIHKSGQNIKNKNQKRSNCKKTSTFDYDIVKDRRYCKDKFMLHLPITVNFGTNESGKFNELVNNAIRADKDVNVIGIDRGERNLLYVVVVDPCGKIIEQISLNTIVDKEYDIETDYHQLLDEKEGSRDKARKDWNTIENIKELKEGYLSQVVNIIAKLVLKYDAIICLEDLNFGFKRGRQKVEKQVYQKFEKMLIDKMNYLVLDKSRKQESPQKPGGALNALQLTSAFKSFKELGKQTGIIYYVPAYLTSKIDPTTGFANLFYIKYESVDKARDFFSKFDFIRYNQMDNYFEFGFDYKSFTERASGCKSKWIACTNGERIVKYRNSDKNNSFDDKTVILTDEYRSLFDKYLQNYIDEDDLKDQILQIDSADFYKNLIKLFQLTLQMRNSSSDGKRDYIISPVKNYREEFFCSEFSDDTFPRDADANGAYNIARKGLWVIKQIRETKSGTKINLAMSNSEWLEYAQCNLL

SEQ ID NO: 61 - protein, 1326 aa, Prevotella disiens
  MISC_FEATURE (1)..(1326): Genbank WP_050786240 Cpf1
MKVMENYQEFTNLFQLNKTLRFELKPIGKTCELLEEGKIFASGSFLEKDKVRADNVSYVKKEIDKKHKIFIEETLSSFSISNDLLKQYFDCYNELKAFKKDCKSDEEEVKKTALRNKCTSIQRAMREAISQAFLKSPQKKLLAIKNLIENVFKADENVQHFSEFTSYFSGFETNRENFYSDEEKSTSIAYRLVHDNLPIFIKNIYIFEKLKEQFDAKTLSEIFENYKLYVAGSSLDEVFSLEYFNNTLTQKGIDNYNAVIGKIVKEDKQEIQGLNEHINLYNQKHKDRRLPFFISLKKQILSDREALSWLPDMFKNDSEVIKALKGFYIEDGFENNVLTPLATLLSSLDKYNLNGIFIRNNEALSSLSQNVYRNFSIDEAIDANAELQTFNNYELIANALRAKIKKETKQGRKSFEKYEEYIDKKVKAIDSLSIQEINELVENYVSEFNSNSGNMPRKVEDYFSLMRKGDFGSNDLIENIKTKLSAAEKLLGTKYQETAKDIFKKDENSKLIKELLDATKQFQHFIKPLLGTGEEADRDLVFYGDFLPLYEKFEELTLLYNKVRNRLTQKPYSKDKIRLCFNKPKLMTGWVDSKTEKSDNGTQYGGYLFRKKNEIGEYDYFLGISSKAQLFRKNEAVIGDYERLDYYQPKANTIYGSAYEGENSYKEDKKRLNKVIIAYIEQIKQTNIKKSIIESISKYPNISDDDKVTPSSLLEKIKKVSIDSYNGILSFKSFQSVNKEVIDNLLKTISPLKNKAEFLDLINKDYQIFTEVQAVIDEICKQKTFIYFPISNVELEKEMGDKDKPLCLFQISNKDLSFAKTFSANLRKKRGAENLHTMLFKALMEGNQDNLDLGSGAIFYRAKSLDGNKPTHPANEAIKCRNVANKDKVSLFTYDIYKNRRYMENKFLFHLSIVQNYKAANDSAQLNSSATEYIRKADDLHIIGIDRGERNLLYYSVIDMKGNIVEQDSLNIIRNNDLETDYHDLLDKREKERKANRQNWEAVEGIKDLKKGYLSQAVHQIAQLMLKYNAIIALEDLGQMFVTRGQKIEKAVYQQFEKSLVDKLSYLVDKKRPYNELGGILKAYQLASSITKNNSDKQNGFLFYVPAWNTSKIDPVTGFTDLLRPKAMTIKEAQDFFGAFDNISYNDKGYFEFETNYDKFKIRMKSAQTRWTICTFGNRIKRKKDKNYWNYEEVELTEEFKKLFKDSNIDYENCNLKEEIQNKDNRKFFDDLIKLLQLTLQMRNSDDKGNDYIISPVANAEGQFFDSRNGDKKLPLDADANGAYNIARKGLWNIRQIKQTKNDKKLNLSISSTEWLDFVREKPYLK

SEQ ID NO: 62 - protein, 998 aa, Arcobacter butzleri
  MISC_FEATURE (1)..(998): Genbank WP_052943011 Cpf1
MGLLEHLEGAIVEDMFSLDYFSLTLSQRYIDIYNTMIGGNTLADGTKVQGINENINIYRQKNNIDRKNLPTLKPLHKQLLSDRETLSWIPEAFKTKEEVVGAIEDFYKNNIISFKCCDNIVDITKQFIDIFSLNEDYELNKIFIKNDISITSISQDIFKDYRIIKEALWQKHINENPKAAKSKDLTGDKEKYFSRKNSFFSFEEIISSLKLMGRKIDLFSYFKDNVEYRAHSIETTFIKWQKNKNDKKTTKELLDNILNLQRVLKPLYLKAEVEKDILFYSIFDIYFESLNEIVKLYNKVRDFESKKPYSLEKFKLNFQNSTLLSGWDVNKEPDNTSILLKKDGLYYLGIMDKKHNRVFKNLESSKGGYEKIEYKLLSGPNKMLPKVFFSNKSIGYYNPSPALLEKYKSGVHKKGESFDLNFCHELIDFFKASIDKHEDWKNFNFKFSDTSEYADISGFYREVEQQGYKITFKNIDEEFINTLINEGKLYLFQIYNKDFSTFSKGTKNLHTLYWEMIFNEENLKNVVYKLNGEAEIFYRKKSIEYSEDKMKYGHHYEELKDKFNYPIIKDKRFTMDKFQFHVPITMNFKATGRSYINEEVNDFLRQNSKDVKIIGINRGERHLIYLTMINAKGEIIQQYSLNEIVNSYNNKNFTVNYNEKLSKKEGERAIARENWGVVENIKELKEGYLSHAIHTISNLIVENNAIVVLEDLNFEFKRERLKVEKSIYQKFEKMLIDKLNYLVDKKKDINENGGLLKALQLTNKFESFEKIGKQNGFLFFVNAWNITKICPVTGFVSLFDTRYQSVDKAREFFSKFDSIKYNEEKEHYEFVFDYSNFTDKAKDTKTKWTVCSYGTRIKTFRNSEKNNNWDNKTVSPTEDLSKLLKSCDRDIKEFIISQDKKEFFVELLEIFSLIVQMKNSIINSEIDYIISPVANENGEFFDSRFANSSLPKNADANAAYNTARKGLMLLEKIRDSEIGKKIDMKITNTEWLNFVQER

SEQ ID NO: 63 - protein, 1475 aa, Treponema endosymbiont of Eucomonympha sp.
  MISC_FEATURE (1)..(1475): Genbank WP_062376669 Cpf1
MTAFEELTNLYSVSKTLRFELKPAGKDGNTLSAEESAKLFKEILDQDRKIKDAYLALKPVMDTIHEKIINSSLGSDEARQIDFSAYYIEYNKKDNEYAVKKAEESLRAAIRSAFDKAANELAKNAGNDEKGKPIFKKKKGKDVGVEYLTQAGIIKYIENHIKTLVPQKVKEFIDKKNVINAKGKKITERTGHLAVFDSFFTYFGGYNTNRKNYYTEDKEKATAVATRIVHDNLPKFCDNCIQFSQDKIVTKRKSKETIPARKDEYLNAYQFLKDSEKTTQIKDAATNTMIEAYPVDERTFEIARFSECLTQAGIEEYNRIIGHYNSLINLYNQTRKGESDFRKLEQFKTLHKQIGCGEKKGWRDALKDNEDLKGKLKAISEAGQKYFTASLNPDDITFFSFIDWLKKNEDWDGVYWSKSAVDKVSGVYFANWHDIKDRLKGNKACVHLDKNKELQINDAVELSGLFAVINSGNSESADIHAQEHGLFDALNQENNEDLSKTLFKQSVLDEKASLIDEKLSASKNLINLICADMENLANAFCETSAEIMKITDFKNEANILSIKNWLDTAKSLIWRVKDFDIKESKRKGNAINAELSNMLTELLHADDARWFDWYDLVRNYLTKKPQDDAKANKLKLNFGYGKLLDGFVDSHTDESDASTQYGGYLFRKRTDAQEKSDFEYFLGISKNTKLFRCHLQSTVQNHDKSNFERLEYYQAKSTTYFDAKYSENKAKLVEIIESLIDDRAKTDSELTVIGNEIKKRDGKGEITPSALFDRVKKDKAFSRILNDDTLLKAVTQAIRDLQNSCDNFSERAPRLKEVQKRGYFGIVGFKQIVEDLQTVAKENKVFNFFNVSQPEFENAFISGGKRIYLFKISNKDLSYSETSQKDENGQQKRNFKGIENLHTHYFRALMREYKNCTNVDLGKGEIFFRAPVPEIKKEATHKVYDKMVNRRENETHIAIPEKVHNELLLFANEKIAVNNLSNETKLYLDQNKKIDESRVKIKDVKHDIIKDKRFTEAKYQLHLSILLNFTPTKEEVNAKINDTFTKSDDIQFLGIDRGEKHLIYYSLVDANGTIRAQDHFDVINKTDYLQKITEAAKIRREKQENWQQKGNISNLKDGYISLVVHEIIEKMKDENGSFKPMFIVLEDLNTGFKRSRQKFEQQVYQKFELALAKKLNYLVDKNAKDGELASVSRALQLTPLVMNYQDIENRKQVGIMLYTRANYTSVTDPATGWRKTVYLKPGSEESIKKQILGVFSEIGVDEKGDYFFQYSDTNTERTWRLWSSKNGKSLERYRGRRDKNTNAFTVEPYDVKATLNKLFVGFDKDMSLLKQLKDGKTLSKIDGRKETAWESLRFVIDLIQQIRNSGDTSKNQDDNFLLSPVRNAQGEHFDSRLYQNQETPKLPKDADANGAYNIARKGIIMYAHIRQWINDGGQRFEKSSDLDLFVSDNEWDLWLFDSKQWKEQLQKFASRKQKK

SEQ ID NO: 64 - protein, 1251 aa, Moraxella lacunata
  MISC_FEATURE (1)..(1251): Genbank WP_062499108 Cpf1
MLFQDFTHLYPLSKTVRFELKPIGKTLEHIHAKNFLSQDETMADMYQKVKAILDDYHRDFITKMMSEVTLTKLPEFYEVYLALRKNPKDDTLQKQLTEIQTALREEVVKPIDSGGKYKAGYERLFGAKLFKDGKELGDLAKFVIAQEGESSPKLPQIAHFEKFSTYFTGFHDNRKNMYSSDDKHTAIAYRLIHENLPRFIDNLQILVTIKQKHSVLYDQIVNELNANGLDVSLASHLDGYHKLLTQEGITAYNRIIGEVNSYTNKHNQICHKSERIAKLRPLHKQILSDGMGVSFLPSKFADDSEMCQAVNEFYRHYAHVFAKVQSLFDRFDDYQKDGIYVEHKNLNELSKQAFGDFALLGRVLDGYYVDVVNPEFNDKFAKAKTDNAKEKLTKEKDKFIKGVHSLASLEQAIEHYIAGHDDESVQAGKLGQYFKHGLAGVDNPIQKIHNSHSTIKGFLERERPAGERTLPKIKSDKSLEMTQLRQLKELLDNALNVVHFAKLLTTKTTLDNQDGNFYGEFGALYDELAKIATLYNKVRDYLSQKPFSTEKYKLNFGNPTLLNGWDLNKEKDNFGVILQKDGCYYLALLDKAHKKVFDNAPNTGKSVYQKMVYKLLPGSNKMLPKVFFAKSNLDYYNPSAELLDKYAQGTHKKGDNFNLKDCHALIDFFKASINKHPEWQHFGFEFSLTSSYQDLSDFYREVEPQGYQVKFVDIDADYIDELVEQGQLYLFQIYNKDFSPKAHGKPNLHTLYFKALFSEDNLANPIYKLNGEAEIFYRKASLDMNETTIHRAGEVLENKNPDNPKERQFVYDIIKDKRYTQDKFMLHVPITMNFGVQGMTIKEFNKKVNQSIQQYDEVNVIGIDRGERHLLYLTVINSKGEILEQRSLNDIITTSANGTQMTTPYHKILDKREIERLNARVGWGEIETIKELKSGYLSHVVHQISQLMLKYNAIVVLEDLNFGFKRGRFKVEKQIYQNFENALIKKLNHLVLKDKADNEIGSYKNALQLTNNFTDLKSIGKQTGFLFYVPAWNTSKIDPVTGFVDLLKPRYENIAQSQAFFDKFDKICYNADKGYFEFHIDYAKFTDKAKNSRQIWTICSHGDKRYVYDKTANQNKGATIGINVNDELKSLFARYRINDKQPNLVMDICQNNDKEFHKSLTYLLKALLALRYSNASSDEDFILSPVANDKGVFFNSALADDTQPQNADANGAYHIALKGLWLLNELKNSDDLDKVKLAIDNQTWLNFAQNR

SEQ ID NO: 65 - DNA, 50 bp, Artificial Sequence
  Chemically synthesized cTAG_A sequence
actgggtggaatcccttctgcagcacctggattaccctgttatccctagt

SEQ ID NO: 66 - DNA, 50 bp, Artificial Sequence
  Chemically synthesized cTAG_B sequence
taatgagtagtcctcatctccctcaagcaggcgccggcggtactgccatc

SEQ ID NO: 67 - DNA, 50 bp, Artificial Sequence
  Chemically synthesized cTAG_C sequence
catataatctccctcaagcaggccccgctggcgcgcgcgaatgttaggaa

SEQ ID NO: 68 - DNA, 50 bp, Artificial Sequence
  Chemically synthesized cTAG_D sequence
gcctataatgtgaagagcttcactgagtagggcccgggctgtaaacggtt

SEQ ID NO: 69 - DNA, 50 bp, Artificial Sequence
  Chemically synthesized cTAG_E sequence
attcgctagcagatgtagtgtttccacaggggcgatcgctgatatgggtc

SEQ ID NO: 70 - DNA, 50 bp, Artificial Sequence
  Chemically synthesized cTAG_F sequence
actacctagctgcattttcaggaggaagcgatgggcggccgcacaccttc

SEQ ID NO: 71 - DNA, 50 bp, Artificial Sequence
  Chemically synthesized cTAG_G sequence
tgataatgggtgagtgagtgtgtgcgtgtggggcgcgccagatgggaaca

SEQ ID NO: 72 - DNA, 50 bp, Artificial Sequence
  Chemically synthesized cTAG_H sequence
actccagtctttctagaagatggcaaacagctattatgggtattatgggt

SEQ ID NO: 73 - DNA, 50 bp, Artificial Sequence
  Chemically synthesized cTAG_I sequence
tagtggacggggccactagggacaggattggcctgcaggattcccgtcaa

SEQ ID NO: 74 - DNA, 42 bp, Artificial Sequence
  Chemically synthesized cTAG_J sequence
tgaactaaggcggctgcacaaccagtggaggcctaaatgatc

SEQ ID NO: 75 - DNA, 25 bp, Artificial Sequence
  Chemically synthesized tagD_FWD PCR primer
gcctataatgtgaagagcttcactg

SEQ ID NO: 76 - DNA, 19 bp, Artificial Sequence
  Chemically synthesized tagE_REV PCR primer
gacccatatcagcgatcgc

SEQ ID NO: 77 - DNA, 9312 bp, Artificial Sequence
  Plasmid 13000444591
tccaaacgagagtctaatagaatgaggtcgaaaagtaaatcgcgcgggtttgttactgataaagcaggcaagacctaaaatgtgtaaagggcaaagtgtatactttggcgtcaccccttacatattttaggtctttttttattgtgcgtaactaacttgccatcttcaaacaggagggctggaagaagcagaccgctaacacagtacataaaaaaggagacatgaacgactccagtctttctagaagatggcaaacagctattatgggtattatgggtccccgaagcagggttatgcagcggaaaagctccccgaaaagtgccacctgggtccttttcatcacgtgctataaaaataattataatttaaattttttaatataaatatataaattaaaaatagaaagtaaaaaaagaaattaaagaaaaaatagtttttgttttccgaagatgtaaaagactctagggggatcgccaacaaatactaccttttatcttgctcttcctgctctcaggtattaatgccgaattgtttcatcttgtctgtgtagaagaccacacacgaaaatcctgtgattttacattttacttatcgttaatcgaatgtatatctatttaatctgcttttcttgtctaataaatatatatgtaaagtacgctttttgttgaaattttttaaacctttgtttattttttttttcttcattccgtaactcttctaccttctttatttactttctaaaatccaaatacaaaacataaaaataaataaacacagagtaaattcccaaattattccatcattaaaagatacgaggcgcgtgtaagttacaggcaagcgatccgtctaagaaaccattattatcatgacattaacctataaaaataggcgtatcacgaggccctttcgtctcgcgcgtttcggtgatgacggtgaaaacctctgacacatgcagctcccggagacggtcacagcttgtctgtaagcggatgccgggagcagacaagcccgtcagggcgcgtcagcgggtgttggcgggtgtcggggctggcttaactatgcggcatcagagcagattgtactgagagtgcaccataccacagccggaagaggagtagggaatattactggctgaaaataagtcttgaatgaacgtatacgcgtatatttctaccaatctctcaacactgagtaatggtagttataagaaagagaccgagttagggacagttagaggcggtggagatattccttatggcatgtctggcgatgataaaacttttcaaacggcagccccgatctaaaagagctgacagggaaatggtcagaaaaagaaacgtgcacccgcccgtctggacgcgccgctcacccgcacggcagagaccaatcagtaaaaatcaacggttaacgacattactatatatataatataggaagcatttaatagaacagcatcgtaatatatgtgtactttgcagttatgacgccagatggcagtagtggaagatattctttattgaaaaatagcttgtcaccttacgtacaatcttgatccggagcttttctttttttgccgattaagaattcggtcgaaaaaagaaaaggagagggccaagagggagggcattggtgactattgagcacgtgagtatacgtgattaagcacacaaaggcagcttggagtatgtctgttattaatttcacaggtagttctggtccattggtgaaagtttgcggcttgcagagcacagaggccgcagaatgtgctctagattccgatgctgacttgctgggtattatatgtgtgcccaatagaaagagaacaattgacccggttattgcaaggaaaatttcaagtcttgtaaaagcatataaaaatagttcaggcactccgaaatacttggttggcgtgtttcgtaatcaacctaaggaggatgttttggctctggtcaatgattacggcattgatatcgtccaactgcatggagatgagtcgtggcaagaataccaagagttcctcggtttgccagttattaaaagactcgtatttccaaaagactgcaacatactactcagtgcagcttcacagaaacctcattcgtttattcccttgtttgattcagaagcaggtgggacaggtgaacttttggattggaactcgatttctgactgggttggaaggcaagagagccccgaaagcttacattttatgttagctggtggactgacgccagaaaatgttggtgatgcgcttagattaaatggcgttattggtgttgatgtaagcggaggtgtggagacaaatggtgtaaaagactctaacaaaatagcaaatttcgtcaaaaatgctaagaaataggttattactgagtagtatttatttaagtattgtttgtgcacttgcctgcaggccttttgaaaagcaagcataaaagatctaaacataaaatctgtaaaataacaagatgtaaagataatgctaaatcatttggctttttgattgattgtacaggactgggtggaatcccttctgcagcacctggattaccctgttatccctagttttgatgggtatcggtattgctactggggaaaatcgcgcggcagaggcagcaaaaaaagcaatttccagcccgcttcttgaagcggccattgacggtgcgcaaggcgtcctcatgaacatcactggaggaacaaacctcagcctatatgaggttcaggaagcagcagacattgtcgcttcggcgtctgatcaagacgtaaacatgattttcggttctgttattaatgaaaatctaaaagatgagattgtggtgacagtgattgcaaccggctttatcgaacaagagaaggacgtgacgaagcctcagcgcccaagcttaaatcaaagcatcaaaacacacaatcaaagtgttccgaagcgtgacgcaaaacgtgaggaacctcagcagcagaacacagtaagccgtcatacttcacagccggctgatgatacgcttgacatcccgacattcttaagaaaccgtaataaacgcggctaatgtaaaggacaaaatcgttttcgattttgtcttttttgtttttctcttcacacttccttcttataaagtctttttccctattgctttccttcgcttagtaacaaaacagataattagacccatttatttttgtgacatttttatcattttcatatatatggaaattgaatgacatgaaacgacaatatctgtaattcagattgtctacagttaatatacagcgatgttctgacaaaccattcattattaaaaggagggacgacactttttttaaaaagcatgttgaaaaagggggatgaaaatgaggaaaaaaacgaaaaacagactcatcagctctgttttaagtacagttgtcatcagttcactgctgtttccgggagcagccggggcaagcagtaaagtcacctcaccttctgttaaaaaggagcttcaatctgcggaatccattcaaaacaagatttcgagttcattaaagaaaagctttaaaaagaaagaaaaaacgacttttctgattaaatttaaagatcttaatgagtagtcctcatctccctcaagcaggcgccggcggtactgccatccaaaaatcagaccagacaaaagcggcaaatgaataagcggaacggggaaggatttgcggtcaagtccttcccttccgcacgtatcaattcgcaagcttttcctttataatagaatgaatgagaaggatgaaaccgaatgaacacttatgaacaaattaacaaagtgaaaaagatcttacgcaaacacttgaaaaataacttaattggcacatacatgttcggtagcggagtagaaagcggccttaaaccgaacagcgaccttgacttccttgttgttgtttcagagcctttaacggatcaatctaaagaaattttaatccagaaaattcgcccaatctctaaaaaaatcggagacaaatcaaatctgcgctatatcgaacttacaattattattcaacaagagatggtcccatggaatcaccctccgaaacaagagttcatttacggtgagtggttgcaggaactctatgaacaaggatatatcccgcagaaggagcttaactccgatcttactatcatgctttaccaagcgaaacgtaaaaataaacgtatctacggtaactacgatctcgaagaacttcttcctgatattccattctctgatgttcgccgcgccatcatggatagctctgaagaactcatcgacaactaccaggacgatgaaacaaactctattcttacattatgtcgcatgattcttactatggatacgggtaaaatcatcccaaaggatattgcaggaaacgcagtagctgaatcctcccctcttgagcatcgcgaacgcattcttcttgctgtacgttcttaccttggggaaaatatcgaatggacaaacgaaaatgttaatttaacaatcaactatcttaacaaccgccttaaaaaactgtgaaaaaaagcgcagctgaaatagctgcgcttttttgtgtcataacatataatctccctcaagcaggccccgctggcgcgcgcgaatgttaggaaacgattagtcttttgactgtttgacggtggtggtactggggcctataatgtgaagagcttcactgagtagggcccgggctgtaaacggttaattttgtcaaaataattttattgacaacgtcttattaacgttgatataatttaaattttatttgacaaaaatgggctcgtgttgtacaataaatgttactagagaaaggtggtgaatactagatgacggcattgacggaaggtgcaaaactgtttgagaaagagatcccgtatatcaccgaactggaaggcgacgtcgaaggtatgaaatttatcattaaaggcgagggtaccggtgacgcgaccacgggtaccattaaagcgaaatacatctgcactacgggcgacctgccggtcccgtgggcaaccctggtgagcaccctgagctacggtgttcagtgtttcgccaagtacccgagccacatcaaggatttctttaagagcgccatgccggaaggttatacccaagagcgtaccatcagcttcgaaggcgacggcgtgtacaagacgcgtgctatggttacctacgaacgcggttctatctacaatcgtgtcacgctgactggtgagaactttaagaaagacggtcacattctgcgtaagaacgttgcattccaatgcccgccaagcattctgtatattctgcctgacaccgttaacaatggcatccgcgttgagttcaaccaggcgtacgatattgaaggtgtgaccgaaaaactggttaccaaatgcagccaaatgaatcgtccgttggcgggctccgcggcagtgcatatcccgcgttatcatcacattacctaccacaccaaactgagcaaagaccgcgacgagcgccgtgatcacatgtgtctggtagaggtcgtgaaagcggttgatctggacacgtatcagtaaaaaaaaagcgcagctgaaatagctgcgcttttttgtgtcataaccctttacagtcataaaaattatggtataatcatttctgttgtctttttaaagacacaagcatgaccattatgactagattcgctagcagatgtagtgtttccacaggggcgatcgctgatatgggtccagttcaaaagggattatggtcgataaagatttttatctcgtatatatccagtcgaaacctgatccgtattcacctggattggcaatggatgaaaccggccagaattccggccgcaactggcagtatatagatggaaagtggcagccaggtgacaaagcggatggcaactatatgattcgcgcattagttgattatgaagctgctgtacctgagattacttcaccgacagacaaatcatacacaaataaggatagcgtcactgtaaaaggaaacgcttctcctggcacaacggtacacatttataatggagagaaagaagcaggagaaacgaaagctgctgcggatggcacgttccatgcaggcatcatactcaacaagggtgaaaatgagctgacggcaactgcatcaactgacaacggaacaacagatgcctccagcccaatcacggtcacgcttgatcaagaaaagcctgaattaacactggacaatccaaaggatggcgggaaaacaaataaagaaacgctgactgtcaaaggggctgtatccgatgacaatctgaaagacgtcaaggtgaatggcaaaaaagcaacagtagctgatggttcatactcagcccgtattcttttggaaaatggaagaaatgaaatcaaggtaattgctacagacttggcaggcaacaaaacgacgaaaaagacagtcattgatgtgaactttgacaagcctgtcatttccggcttaattccgggagaggataaaaacttaaaagccggtgaatctgtgaaaatcgctttctcaagcgctgaggatttagatgcaacgtttaccattcgtatgccgctgaccaatgcaagagcgagtgtgcaaaatgccaccgaactcccgttaagagaaatctctccggggagatatgaaggctattggactgccacttcttctattaaagcaaaaggagcaaaagtagaagtgatcgtccgagatgattatggaaatgaaacaagaaaaactgcgaatggaaaacttaatatgaacacagaaaatactacctagctgcattttcaggaggaagcgatgggcggccgcacaccttctatgcggtgtgaaataccgccatgacccttaaatattctgacaaatgctctttccctaaactccccccataaaaaaacccgccgaagcgggtttttacgttatttgcggattaacgattactcgttatcagaaccgcccaggatgcctggcagttccctactctcgccgctgcgctcggtcgttcggctgcgggacctcagcgctagcggagtgtatactggcttactatgttggcactgatgagggtgtcagtgaagtgcttcatgtggcaggagaaaaaaggctgcaccggtgcgtcagcagaatatgtgatacaggatatattccgcttcctcgctcactgactcgctacgctcggtcgttcgactgcggcgagcggaaatggcttacgaacggggcggagatttcctggaagatgccaggaagatacttaacagggaagtgagagggccgcggcaaagccgtttttccataggctccgcccccctgacaagcatcacgaaatctgacgctcaaatcagtggtggcgaaacccgacaggactataaagataccaggcgtttccccctggcggctccctcgtgcgctctcctgttcctgcctttcggtttaccggtgtcattccgctgttatggccgcgtttgtctcattccacgcctgacactcagttccgggtaggcagttcgctccaagctggactgtatgcacgaaccccccgttcagtccgaccgctgcgccttatccggtaactatcgtcttgagtccaacccggaaagacatgcaaaagcaccactggcagcagccactggtaattgatttagaggagttagtcttgaagtcatgcgccggttaaggctaaactgaaaggacaagttttggtgactgcgctcctccaagccagttacctcggttcaaagagttggtagctcagagaaccttcgaaaaaccgccctgcaaggcggttttttcgttttcagagcaagagattacgcgcagaccaaaacgatctcaagaagatcatcttattaagcctcactcattaggcaccccaggctttacactgataatgggtgagtgagtgtgtgcgtgtggggcgcgccagatgggaacagctagcttcacgctgccgcaagcactcagggcgcaagggctgctaaaggaagcggaacacgtagaaagccagtccgcagaaacggtgctgaccccggatgaatgtcagctactgggctatctggacaagggaaaacgcaagcgcaaagagaaagcaggtagcttgcagtgggcttacatggcgatagctagactgggcggttttatggacagcaagcgaaccggaattgccagctggggcgccctctggtaaggttgggaagccctgcaaagtaaactggatggctttcttgccgccaaggatctgatggcgcaggggatcaagatctgatcaagagacaggatgaggatcgtttcgcatgattgaacaagatggattgcacgcaggttctccggccgcttgggtggagaggctattcggctatgactgggcacaacagacaatcggctgctctgatgccgccgtgttccggctgtcagcgcaggggcgcccggttctttttgtcaagaccgacctgtccggtgccctgaatgaactccaagacgaggcagcgcggctatcgtggctggccacgacgggcgttccttgcgcagctgtgctcgacgttgtcactgaagcgggaagggactggctgctattgggcgaagtgccggggcaggatctcctgtcatctcaccttgctcctgccgagaaagtatccatcatggctgatgcaatgcggcggctgcatacgcttgatccggctacctgcccattcgaccaccaagcgaaacatcgcatcgagcgagcacgtactcggatggaagccggtcttgtcgatcaggatgatctggacgaagagcatcaggggctcgcgccagccgaactgttcgccaggctcaaggcgcggatgcccgacggcgaggatctcgtcgtgacccatggcgatgcctgcttgccgaatatcatggtggaaaatggccgcttttctggattcatcgactgtggccggctgggtgtggcggaccgctatcaggacatagcgttggctacccgtgatattgctgaagagcttggcggcgaatgggctgaccgcttcctcgtgctttacggtatcgccgctcccgattcgcagcgcatcgccttctatcgccttcttgacgagttcttctgagcgggactctggggttcgctagaggatcgatcctttttaacccatcacatatacctgccgttcactattatttagtgaaatgagatattatgatattttctgaattgtgattaaaaaggcaactttatgcccatgcaacagaaactataaaaaatacagagaatgaaaagaaacagatagattttttagttctttaggcccgtagtctgcaaatccttttatgattttctatcaaacaaaagaggaaaatagaccagttgcaa

SEQ ID NO: 78 - DNA, 50 bp, Artificial Sequence
  Chemically synthesized cloning tag cTag K from pMLN005
gcagatgtagtgtttccacagggccccccttattaaatgacttctcgaaa

SEQ ID NO: 79 - DNA, 77 bp, Artificial Sequence
  Chemically synthesized cloning tag cTag L from pMLN005
tttcgtctagagccttttgtataaaaattagggaccttgcactgactgccccccggtgagtgagtgtgtgcgtgtgg

SEQ ID NO: 80 - DNA, 50 bp, Artificial Sequence
  Chemically synthesized cloning tag cTag K' from pMAS006
gcagatgtagtgtttccacagggtttcgagaagtcatttaataagccccc

SEQ ID NO: 81 - DNA, 50 bp, Artificial Sequence
  Chemically synthesized cloning tag cTag L' from pMAS006
aaaaaatacaaaaggctctagacgaaaggtgagtgagtgtgtgcgtgtgg

SEQ ID NO: 82 - DNA, 2781 bp, Artificial Sequence
  Synthetically constructed plasmid pMLN005 CamR in vitro
gcattttcaggaggaagcgatgggcggccgcacaccttctcatgaccaaaatcccttaacgtgagttttcgttccactgagcgtcagaccccgtagaaaagatcaaaggatcttcttgagatcctttttttctgcgcgtaatctgctgcttgcaaacaaaaaaaccaccgctaccagcggtggtttgtttgccggatcaagagctaccaactctttttccgaaggtaactggcttcagcagagcgcagataccaaatactgtccttctagtgtagccgtagttaggccaccacttcaagaactctgtagcaccgcctacatacctcgctctgctaatcctgttaccagtggctgctgccagtggcgataagtcgtgtcttaccgggttggactcaagacgatagttaccggataaggcgcagcggtcgggctgaacggggggttcgtgcacacagcccagcttggagcgaacgacctacaccgaactgagatacctacagcgtgagctatgagaaagcgccacgcttcccgaagggagaaaggcggacaggtatccggtaagcggcagggtcggaacaggagagcgcacgagggagcttccagggggaaacgcctggtatctttatagtcctgtcgggtttcgccacctctgacttgagcgtcgatttttgtgatgctcgtcaggggggcggagcctatggaaaaacgccagcaacgcggcctgataattgtaggctggataagatgcgtcagcatcgcatccggcaaaggcagatctcgcagatgtagtgtttccacagggcccccttgatcgggcacgtaagaggttccaactttcaccataatgaaataagatcactaccgggcgtattttttgagttatcgagattttcaggagctaaggaagctaaaatggagaaaaaaatcactggatataccaccgttgatatatcccaatggcatcgtaaagaacattttgaggcatttcagtcagttgctcaatgtacctataaccagaccgttcagctggatattacggcctttttaaagaccgtaaagaaaaataagcacaagttttatccggcctttattcacattcttgcccgcctgatgaatgctcatccggaatttcgtatggcaatgaaagacggtgagctggtgatatgggatagtgttcacccttgttacaccgttttccatgagcaaactgaaacgttttcatcgctctggagtgaataccacgacgatttccggcagtttctacacatatattcgcaagatgtggcgtgttacggtgaaaacctggcctatttccctaaagggtttattgagaatatgtttttcgtttcagccaatccctgggtgagtttcaccagttttgatttaaacgtggccaatatggacaacttcttcgcccccgttttcaccatgggcaaatattatacgcaaggcgacaaggtgctgatgccgctggcgattcaggttcatcatgccgtttgtgatggcttccatgtcggcagaatgcttaatgaattacaacagtactgcgatgagtggcagggcggggcgtaatttgatatcgagctcgcttggactcctgttgatagatccagtaatgacctcagaactccatctggatttgttcagaacgctcggttgccgccgggcgttttttattggtaaaaattagggaccttgcactgactgccccccggtgagtgagtgtgtgcgtgtggtcagaattggttaattggttgtaacactgacccctatttgtttatttttctaaatacattcaaatatgtatccgctcatgagacaataaccctgataaatgcttcaataatattgaaaaaggaagaatatgagtattcaacatttccgtgtcgcccttattcccttttttgcggcattttgccttcctgtttttgctcacccagaaacgctggtgaaagtaaaagatgctgaagatcagttgggtgcacgagtgggttacatcgaactggatctcaacagcggtaagatccttgagagttttcgccccgaagaacgttttccaatgatgagcacttttaaagttctgctatgtggcgcggtattatcccgtattgacgccgggcaagagcaactcggtcgccgcatacactattctcagaatgacttggttgagtactcaccagtcacagaaaagcatcttacggatggcatgacagtaagagaattatgcagtgctgccataaccatgagtgataacactgcggccaacttacttctgacaacgatcggaggaccgaaggagctaaccgcttttttgcacaacatgggggatcatgtaactcgccttgatcgttgggaaccggagctgaatgaagccataccaaacgacgagcgtgacaccacgatgcctgtagcgatggcaacaacgttgcgcaaactattaactggcgaactacttactctagcttcccggcaacaattaatagactggatggaggcggataaagttgcaggaccacttctgcgctcggcccttccggctggctggtttattgctgataaatccggagccggtgagcgtggttctcgcggtatcatcgcagcgctggggccagatggtaagccctcccgtatcgtagttatctacacgacggggagtcaggcaactatggatgaacgaaatagacagatcgctgagataggtgcctcactgattaagcattggtaataatgaagcgatagcgccggcttagtcagatttaatctgcgcgcgtggtggatatt

SEQ ID NO: 83 - DNA, 3128 bp, Artificial Sequence
  Synthetically constructed plasmid 13000789485 pMLN 005
gcattttcaggaggaagcgatgggcggccgcacaccttctcatgaccaaaatcccttaacgtgagttttcgttccactgagcgtcagaccccgtagaaaagatcaaaggatcttcttgagatcctttttttctgcgcgtaatctgctgcttgcaaacaaaaaaaccaccgctaccagcggtggtttgtttgccggatcaagagctaccaactctttttccgaaggtaactggcttcagcagagcgcagataccaaatactgtccttctagtgtagccgtagttaggccaccacttcaagaactctgtagcaccgcctacatacctcgctctgctaatcctgttaccagtggctgctgccagtggcgataagtcgtgtcttaccgggttggactcaagacgatagttaccggataaggcgcagcggtcgggctgaacggggggttcgtgcacacagcccagcttggagcgaacgacctacaccgaactgagatacctacagcgtgagctatgagaaagcgccacgcttcccgaagggagaaaggcggacaggtatccggtaagcggcagggtcggaacaggagagcgcacgagggagcttccagggggaaacgcctggtatctttatagtcctgtcgggtttcgccacctctgacttgagcgtcgatttttgtgatgctcgtcaggggggcggagcctatggaaaaacgccagcaacgcggcctgataattgtaggctggataagatgcgtcagcatcgcatccggcaaaggcagatctcgcagatgtagtgtttccacagggccccccttattaaatgacttctcgaaactgtggataaccgtattaccgccggcggtgttgacataaataccactggcggtgatactgagcacatcagcaggtcacacaggaaagtactagatgtcgcatcttgcagaattagtagcttcagcgaaggccgcgatttctcaggcgagtgacgtcgcagcactggataatgtacgtgttgagtacctgggaaagaagggacaccttactcttcaaatgacaaccctgcgcgaactgccgccggaggaacgccccgcagcaggagcggtaatcaatgaggcaaaggagcaagtacaacaggcactgaacgcccgtaaggctgagttggaatccgccgcattaaacgcgcgccttgctgcggaaaccattgatgtctcgctgcccgggcgccgcattgagaatggaggcttacacccagtgactcgtaccatcgaccgtatcgaatctttctttggcgaacttggcttcactgtggcaactggaccggagattgaggacgactaccacaatttcgatgccttgaacattcccggtcatcatcctgcacgcgccgatcatgatacattctggtttgataccacccgtttgcttcgtacccagacaagcggtgtccaaatccgtacgatgaaggctcagcaaccaccgatccgtatcattgctccagggcgcgtgtaccgtaacgattatgaccagacacatacaccgatgtttcaccaaatggaagggttgattgtggatacgaatatctctttcacgaatctgaagggcaccttacatgatttcttacgcaactttttcgaggaggaccttcaaattcgctttcgtccatcgtacttcccttttgcagaaccttcggctgaagtggatgtaatggggaaaaacggtaagtggctggaggttttaggttgcgggatggttcatccaaatgtgcttcgcaacgtcggcatcgaccccgaagtctacagtggattcggattcgggatgggaatggaacgtctgactatgcttcgttacggcgtaacggatttgcgctccttttttgagaacgatcttcgttttctgaagcaattcaaataagcatttttagtacgtgcaataaccactctggtttttccagggtggttttttgatgccctttttggagtcttcaactgctgcgttatcccctgattctgtgtttcgtctagagccttttgtataaaaattagggaccttgcactgactgccccccggtgagtgagtgtgtgcgtgtggtcagaattggttaattggttgtaacactgacccctatttgtttatttttctaaatacattcaaatatgtatccgctcatgagacaataaccctgataaatgcttcaataatattgaaaaaggaagaatatgagtattcaacatttccgtgtcgcccttattcccttttttgcggcattttgccttcctgtttttgctcacccagaaacgctggtgaaagtaaaagatgctgaagatcagttgggtgcacgagtgggttacatcgaactggatctcaacagcggtaagatccttgagagttttcgccccgaagaacgttttccaatgatgagcacttttaaagttctgctatgtggcgcggtattatcccgtattgacgccgggcaagagcaactcggtcgccgcatacactattctcagaatgacttggttgagtactcaccagtcacagaaaagcatcttacggatggcatgacagtaagagaattatgcagtgctgccataaccatgagtgataacactgcggccaacttacttctgacaacgatcggaggaccgaaggagctaaccgcttttttgcacaacatgggggatcatgtaactcgccttgatcgttgggaaccggagctgaatgaagccataccaaacgacgagcgtgacaccacgatgcctgtagcgatggcaacaacgttgcgcaaactattaactggcgaactacttactctagcttcccggcaacaattaatagactggatggaggcggataaagttgcaggaccacttctgcgctcggcccttccggctggctggtttattgctgataaatccggagccggtgagcgtggttctcgcggtatcatcgcagcgctggggccagatggtaagccctcccgtatcgtagttatctacacgacggggagtcaggcaactatggatgaacgaaatagacagatcgctgagataggtgcctcactgattaagcattggtaataatgaagcgatagcgccggcttagtcagatttaatctgcgcgcgtggtggatatt

SEQ ID NO: 84 - DNA, 2498 bp, Artificial Sequence
  Synthetically constructed plasmid 13000823784 pMAS006
acgaccgagcgcagcgagtcagtgagcgaggaagcggaagagcgcccaatacgcaaaccgcctctccccgcgcgttggccgattcattaatgcagctggcacgacaggtttcccgactggaaagcgggcagtgagcgcaacgcaattaatgtgagttagctcactcattaggcaccccaggctttacactttatgcttccggctcgtatgttgtgtggaattgtgagcggataacaatttcacacaggaaacagctatgaccatgattacgccaagcttgcatgcctgcaggtcgactctagaggatccccgcagatgtagtgtttccacagggtttcgagaagtcatttaataagcccccttgatcgggcacgtaagaggttccaactttcaccataatgaaataagatcactaccgggcgtattttttgagttatcgagattttcaggagctaaggaagctaaaatggagaaaaaaatcactggatataccaccgttgatatatcccaatggcatcgtaaagaacattttgaggcatttcagtcagttgctcaatgtacctataaccagaccgttcagctggatattacggcctttttaaagaccgtaaagaaaaataagcacaagttttatccggcctttattcacattcttgcccgcctgatgaatgctcatccggaatttcgtatggcaatgaaagacggtgagctggtgatatgggatagtgttcacccttgttacaccgttttccatgagcaaactgaaacgttttcatcgctctggagtgaataccacgacgatttccggcagtttctacacatatattcgcaagatgtggcgtgttacggtgaaaacctggcctatttccctaaagggtttattgagaatatgtttttcgtttcagccaatccctgggtgagtttcaccagttttgatttaaacgtggccaatatggacaacttcttcgcccccgttttcaccatgggcaaatattatacgcaaggcgacaaggtgctgatgccgctggcgattcaggttcatcatgccgtttgtgatggcttccatgtcggcagaatgcttaatgaattacaacagtactgcgatgagtggcagggcggggcgtaatttgatatcgagctcgcttggactcctgttgatagatccagtaatgacctcagaactccatctggatttgttcagaacgctcggttgccgccgggcgttttttattggtaaaaaatacaaaaggctctagacgaaaggtgagtgagtgtgtgcgtgtgggtcgactctagaggatccccgggtaccgagctcgaattcactggccgtcgttttacaacgtcgtgactgggaaaaccctggcgttacccaacttaatcgccttgcagcacatccccctttcgccagctggcgtaatagcgaagaggcccgcaccgatcgcccttcccaacagttgcgcagcctgaatggcgaatggcgcctgatgcggtattttctccttacgcatctgtgcggtatttcacaccgcatatggtgcactctcagtacaatctgctctgatgccgcatagttaagccagccccgacacccgccaacacccgctgacgcgccctgacgggcttgtctgctcccggcatccgcttacagacaagctgtgaccgtctccgggagctgcatgtgtcagaggttttcaccgtcatcaccgaaacgcgcgagacgaaagggcctcgtgatacgcctatttttataggttaatgtcatgataataatggtttcttagacgtcaggtggcacttttcggggaaatgtgcgcggaacccctatttgtttatttttctaaatacattcaaatatgtatccgctcatgagacaataaccctgataaatgcttcaataatattgaaaaaggaagagtatgagtattcaacatttccgtgtcgcccttattcccttttttgcggcattttgccttcctgtttttgctcacccagaaacgctggtgaaagtaaaagatgctgaagatcagttgggtgcacgagtgggttacatcgaactggatctcaacagcggtaagatccttgagagttttcgccccgaagaacgccctggcttgttgtccacaaccgttaaaccttaaaagctttaaaagccttatatattcttttttttcttataaaacttaaaaccttagaggctatttaagttgctgatttatattaattttattgttcaaacatgagagcttagtacgtgaaacatgagagcttagtacgttagccatgagggtttagttcgttagccatgagggtttagttcgttaaacatgagagcttagtacgttaaacatgagagcttagtacgtgaaacatgagagcttagtacgtactatcaacaggttgaactgctgatcttcttctttcctgcgttatcccctgattctgtggataaccgtattaccgcctttgagtgagctgataccgctcgccgcagccga

SEQ ID NO: 85 - DNA, 11567 bp, Artificial Sequence
  Synthetically constructed plasmid 13000283399
actacctagctgcattttcaggaggaagcgatgggcggccgcacaccttctatgcggtgtgaaataccgccatgacccttaaatattctgacaaatgctctttccctaaactccccccataaaaaaacccgccgaagcgggtttttacgttatttgcggattaacgattactcgttatcagaaccgcccaggatgcctggcagttccctactctcgccgctgcgctcggtcgttcggctgcgggacctcagcgctagcggagtgtatactggcttactatgttggcactgatgagggtgtcagtgaagtgcttcatgtggcaggagaaaaaaggctgcaccggtgcgtcagcagaatatgtgatacaggatatattccgcttcctcgctcactgactcgctacgctcggtcgttcgactgcggcgagcggaaatggcttacgaacggggcggagatttcctggaagatgccaggaagatacttaacagggaagtgagagggccgcggcaaagccgtttttccataggctccgcccccctgacaagcatcacgaaatctgacgctcaaatcagtggtggcgaaacccgacaggactataaagataccaggcgtttccccctggcggctccctcgtgcgctctcctgttcctgcctttcggtttaccggtgtcattccgctgttatggccgcgtttgtctcattccacgcctgacactcagttccgggtaggcagttcgctccaagctggactgtatgcacgaaccccccgttcagtccgaccgctgcgccttatccggtaactatcgtcttgagtccaacccggaaagacatgcaaaagcaccactggcagcagccactggtaattgatttagaggagttagtcttgaagtcatgcgccggttaaggctaaactgaaaggacaagttttggtgactgcgctcctccaagccagttacctcggttcaaagagttggtagctcagagaaccttcgaaaaaccgccctgcaaggcggttttttcgttttcagagcaagagattacgcgcagaccaaaacgatctcaagaagatcatcttattaagcctcactcattaggcaccccaggctttacactgataatgggtgagtgagtgtgtgcgtgtggggcgcgccagatgggaacagctagcttcacgctgccgcaagcactcagggcgcaagggctgctaaaggaagcggaacacgtagaaagccagtccgcagaaacggtgctgaccccggatgaatgtcagctactgggctatctggacaagggaaaacgcaagcgcaaagagaaagcaggtagcttgcagtgggcttacatggcgatagctagactgggcggttttatggacagcaagcgaaccggaattgccagctggggcgccctctggtaaggttgggaagccctgcaaagtaaactggatggctttcttgccgccaaggatctgatggcgcaggggatcaagatctgatcaagagacaggatgaggatcgtttcgcatgattgaacaagatggattgcacgcaggttctccggccgcttgggtggagaggctattcggctatgactgggcacaacagacaatcggctgctctgatgccgccgtgttccggctgtcagcgcaggggcgcccggttctttttgtcaagaccgacctgtccggtgccctgaatgaactccaagacgaggcagcgcggctatcgtggctggccacgacgggcgttccttgcgcagctgtgctcgacgttgtcactgaagcgggaagggactggctgctattgggcgaagtgccggggcaggatctcctgtcatctcaccttgctcctgccgagaaagtatccatcatggctgatgcaatgcggcggctgcatacgcttgatccggctacctgcccattcgaccaccaagcgaaacatcgcatcgagcgagcacgtactcggatggaagccggtcttgtcgatcaggatgatctggacgaagagcatcaggggctcgcgccagccgaactgttcgccaggctcaaggcgcggatgcccgacggcgaggatctcgtcgtgacccatggcgatgcctgcttgccgaatatcatggtggaaaatggccgcttttctggattcatcgactgtggccggctgggtgtggcggaccgctatcaggacatagcgttggctacccgtgatattgctgaagagcttggcggcgaatgggctgaccgcttcctcgtgctttacggtatcgccgctcccgattcgcagcgcatcgccttctatcgccttcttgacgagttcttctgagcgggactctggggttcgctagaggatcgatcctttttaacccatcacatatacctgccgttcactattatttagtgaaatgagatattatgatattttctgaattgtgattaaaaaggcaactttatgcccatgcaacagaaactataaaaaatacagagaatgaaaagaaacagatagattttttagttctttaggcccgtagtctgcaaatccttttatgattttctatcaaacaaaagaggaaaatagaccagttgcaatccaaacgagagtctaatagaatgaggtcgaaaagtaaatcgcgcgggtttgttactgataaagcaggcaagacctaaaatgtgtaaagggcaaagtgtatactttggcgtcaccccttacatattttaggtctttttttattgtgcgtaactaacttgccatcttcaaacaggagggctggaagaagcagaccgctaacacagtacataaaaaaggagacatgaacgactccagtctttctagaagatggcaaacagctattatgggtattatgggtccccgaagcagggttatgcagcggaaaagctccccgaaaagtgccacctgggtccttttcatcacgtgctataaaaataattataatttaaattttttaatataaatatataaattaaaaatagaaagtaaaaaaagaaattaaagaaaaaatagtttttgttttccgaagatgtaaaagactctagggggatcgccaacaaatactaccttttatcttgctcttcctgctctcaggtattaatgccgaattgtttcatcttgtctgtgtagaagaccacacacgaaaatcctgtgattttacattttacttatcgttaatcgaatgtatatctatttaatctgcttttcttgtctaataaatatatatgtaaagtacgctttttgttgaaattttttaaacctttgtttattttttttttcttcattccgtaactcttctaccttctttatttactttctaaaatccaaatacaaaacataaaaataaataaacacagagtaaattcccaaattattccatcattaaaagatacgaggcgcgtgtaagttacaggcaagcgatccgtctaagaaaccattattatcatgacattaacctataaaaataggcgtatcacgaggccctttcgtctcgcgcgtttcggtgatgacggtgaaaacctctgacacatgcagctcccggagacggtcacagcttgtctgtaagcggatgccgggagcagacaagcccgtcagggcgcgtcagcgggtgttggcgggtgtcggggctggcttaactatgcggcatcagagcagattgtactgagagtgcaccataccacagccggaagaggagtagggaatattactggctgaaaataagtcttgaatgaacgtatacgcgtatatttctaccaatctctcaacactgagtaatggtagttataagaaagagaccgagttagggacagttagaggcggtggagatattccttatggcatgtctggcgatgataaaacttttcaaacggcagccccgatctaaaagagctgacagggaaatggtcagaaaaagaaacgtgcacccgcccgtctggacgcgccgctcacccgcacggcagagaccaatcagtaaaaatcaacggttaacgacattactatatatataatataggaagcatttaatagaacagcatcgtaatatatgtgtactttgcagttatgacgccagatggcagtagtggaagatattctttattgaaaaatagcttgtcaccttacgtacaatcttgatccggagcttttctttttttgccgattaagaattcggtcgaaaaaagaaaaggagagggccaagagggagggcattggtgactattgagcacgtgagtatacgtgattaagcacacaaaggcagcttggagtatgtctgttattaatttcacaggtagttctggtccattggtgaaagtttgcggcttgcagagcacagaggccgcagaatgtgctctagattccgatgctgacttgctgggtattatatgtgtgcccaatagaaagagaacaattgacccggttattgcaaggaaaatttcaagtcttgtaaaagcatataaaaatagttcaggcactccgaaatacttggttggcgtgtttcgtaatcaacctaaggaggatgttttggctctggtcaatgattacggcattgatatcgtccaactgcatggagatgagtcgtggcaagaataccaagagttcctcggtttgccagttattaaaagactcgtatttccaaaagactgcaacatactactcagtgcagcttcacagaaacctcattcgtttattcccttgtttgattcagaagcaggtgggacaggtgaacttttggattggaactcgatttctgactgggttggaaggcaagagagccccgaaagcttacattttatgttagctggtggactgacgccagaaaatgttggtgatgcgcttagattaaatggcgttattggtgttgatgtaagcggaggtgtggagacaaatggtgtaaaagactctaacaaaatagcaaatttcgtcaaaaatgctaagaaataggttattactgagtagtatttatttaagtattgtttgtgcacttgcctgcaggccttttgaaaagcaagcataaaagatctaaacataaaatctgtaaaataacaagatgtaaagataatgctaaatcatttggctttttgattgattgtacaggactgggtggaatcccttctgcagcacctggattaccctgttatccctagtaacaaaattctccagtcttcacatcggtttgaaaggaggaagcggaagaatgaagtaagagggatttttgactccgaagtaagtcttcaaaaaatcaaataaggagtgtcaagaatgtttgcaaaacgattcaaaacctctttactgccgttattcgctggatttttattgctgtttcatttggttctggcaggaccggcggctgcgagtgctgaaacggcgaacaaatcgaatgagcttacagcaccgtcgatcaaaagcggaaccattcttcatgcatggaattggtcgttcaatacgttaaaacacaatatgaaggatattcatgatgcaggatatacagccattcagacatctccgattaaccaagtaaaggaagggaatcaaggagataaaagcatgtcgaactggtactggctgtatcagccgacatcgtatcaaattggcaaccgttacttaggtactgaacaagaatttaaagaaatgtgtgcagccgctgaagaatatggcataaaggtcattgttgacgcggtcatcaatcataccaccagtgattatgccgcgatttccaatgaggttaagagtattccaaactggacacatggaaacacacaaattaaaaactggtctgatcgaaatagtacataataatgagtagtcctcatctccctcaagcaggcgccggcggtactgccatctcatgtttgacagcttatcatcggcaatagttacccttattatcaagataagaaagaaaaggatttttcgctacgctcaaatcctttaaaaaaacacaaaagaccacattttttaatgtggtctttattcttcaactaaagcacccattagttcaacaaacgaaaattggataaagtgggatatttttaaaatatatatttatgttacagtaatattgacttttaaaaaaggattgattctaatgaagaaagcagacaagtaagcctcctaaattcactttagataaaaatttaggaggcatatcaaatgaactttaataaaattgatttagacaattggaagagaaaagagatatttaatcattatttgaaccaacaaacgacttttagtataaccacagaaattgatattagtgttttataccgaaacataaaacaagaaggatataaattttaccctgcatttattttcttagtgacaagggtgataaactcaaatacagcttttagaactggttacaatagcgacggagagttaggttattgggataagttagagccactttatacaatttttgatggtgtatctaaaacattctctggtatttggactcctgtaaagaatgacttcaaagagttttatgatttatacctttctgatgtagagaaatataatggttcggggaaattgtttcccaaaacacctatacctgaaaatgctttttctctttctattattccatggacttcatttactgggtttaacttaaatatcaataataatagtaattaccttctacccattattacagcaggaaaattcattaataaaggtaattcaatatatttaccgctatctttacaggtacatcattctgtttgtgatggttatcatgcaggattgtttatgaactctattcaggaattgtcagataggcctaatgactggcttttataatatgagataatgccgactgtactttttacagtcggttttctaatgtcactaacctgccccgttagttgaagaaggtttttatattacagctccagatcctctacgccggacgcatcgtggcatataatctccctcaagcaggccccgctggcgcgcgcgaatgttaggaaacgattagtcttttgactgtttgacggtggtggtactggggcctataatgtgaagagcttcactgagtagggcccgggctgtaaacggttgaattcgcggccgcttctagagggagttctgagaattggtatgccttataagtccaattaacagttgaaaacctgcataggagagctatgcgggttttttattttacataatgatacataatttaccgaaacttgcggaacataattgaggaatcatagaattttgtcaaaataattttattgacaacgtcttattaacgttgatataatttaaattttatttgacaaaaatgggctcgtgttgtacaataaatgtagttactagtagcggccgctgcagggatccacagtacataaaaaaggagacatgacgatggtcgttttacaacgtgactgggtcgaccgggaaaaccctggcgttacccaacttaatcgccttgcagcacatccccctttcgccagctggcgtaatagcgaagaggcccgcaccgatcgcccttcccaacagttgcgcagcctgaatggcgaatggcgctttgcctggtttccggcaccagaagcggtgccggaaagctggctggagtgcgatcttcctgaggccgatactgtcgtcgtcccctcaaactggcagatgcacggttacgatgcgcccatctacaccaacgtaacctatcccattacggtcaatccgccgtttgttcccacggagaatccgacgggttgttactcgctcacatttaatgttgatgaaagctggctacaggaaggccagacgcgaattatttttgatggcgttaactcggcgtttcatctgtggtgcaacgggcgctgggtcggttacggccaggacagtcgtttgccgtctgaatttgacctgagcgcatttttacgcgccggagaaaaccgcctcgcggtgatggtgctgcgttggagtgacggcagttatctggaagatcaggatatgtggcggatgagcggcattttccgtgacgtctcgttgctgcataaaccgactacacaaatcagcgatttccatgttgccactcgctttaatgatgatttcagccgcgctgtactggaggctgaagttcagatgtgcggcgagttgcgtgactacctacgggtaacagtttctttatggcagggtgaaacgcaggtcgccagcggcaccgcgcctttcggcggtgaaattatcgatgagcgtggtggttatgccgatcgcgtcacactacgtctgaacgtcgaaaacccgaaactgtggagcgccgaaatcccgaatctctatcgtgcggtggttgaactgcacaccgccgacggcacgctgattgaagcagaagcctgcgatgtcggtttccgcgaggtgcggattgaaaatggtctgctgctgctgaacggcaagccgttgctgattcgaggcgttaaccgtcacgagcatcatcctctgcatggtcaggtcatggatgagcagacgatggtgcaggatatcctgctgatgaagcagaacaactttaacgccgtgcgctgttcgcattatccgaaccatccgctgtggtacacgctgtgcgaccgctacggcctgtatgtggtggatgaagccaatattgaaacccacggcatggtgccaatgaatcgtctgaccgatgatccgcgctggctaccggcgatgagcgaacgcgtaacgcgaatggtgcagcgcgatcgtaatcacccgagtgtgatcatctggtcgctggggaatgaatcaggccacggcgctaatcacgacgcgctgtatcgctggatcaaatctgtcgatccttcccgcccggtgcagtatgaaggcggcggagccgacaccacggccaccgatattatttgcccgatgtacgcgcgcgtggatgaagaccagcccttcccggctgtgccgaaatggtccatcaaaaaatggctttcgctacctggagagacgcgcccgctgatcctttgcgaatacgcccacgcgatgggtaacagtcttggcggtttcgctaaatactggcaggcgtttcgtcagtatccccgtttacagggcggcttcgtctgggactgggtggatcagtcgctgattaaatatgatgaaaacggcaacccgtggtcggcttacggcggtgattttggcgatacgccgaacgatcgccagttctgtatgaacggtctggtctttgccgaccgcacgccgcatccagcgctgacggaagcaaaacaccagcagcagtttttccagttccgtttatccgggcaaaccatcgaagtgaccagcgaatacctgttccgtcatagcgataacgagctcctgcactggatggtggcgctggatggtaagccgctggcaagcggtgaagtgcctctggatgtcgctccacaaggtaaacagttgattgaactgcctgaactaccgcagccggagagcgccgggcaactctggctcacagtacgcgtagtgcaaccgaacgcgaccgcatggtcagaagccgggcacatcagcgcctggcagcagtggcgtctggcggaaaacctcagtgtgacgctccccgccgcgtcccacgccatcccgcatctgaccaccagcgaaatggatttttgcatcgagctgggtaataagcgttggcaatttaaccgccagtcaggctttctttcacagatgtggattggcgataaaaaacaactgctgacgccgctgcgcgatcagttcacccgtgcaccgctggataacgacattggcgtaagtgaagcgacccgcattgaccctaacgcctgggtcgaacgctggaaggcggcgggccattaccaggccgaagcagcgttgttgcagtgcacggcagatacacttgctgatgcggtgctgattacgaccgctcacgcgtggcagcatcaggggaaaaccttatttatcagccggaaaacctaccggattgatggtagtggtcaaatggcgattaccgttgatgttgaagtggcgagcgatacaccgcatccggcgcggattggcctgaactgccagctggcgcaggtagcagagcgggtaaactggctcggattagggccgcaagaaaactatcccgaccgccttactgccgcctgttttgaccgctgggatctgccattgtcagacatgtataccccgtacgtcttcccgagcgaaaacggtctgcgctgcgggacgcgcgaattgaattatggcccacaccagtggcgcggcgacttccagttcaacatcagccgctacagtcaacagcaactgatggaaaccagccatcgccatctgctgcacgcggaagaaggcacatggctgaatatcgacggtttccatatggggattggtggcgacgactcctggagcccgtcagtatcggcggaattaattccagctgagcgccggtcgctaccattaccagttggtctggtgtcaaaaataataataaccgggcaggccatgtctgcccgtatttcgcgtaaggaaatccaattcgctagcagatgtagtgtttccacaggggcgatcgctgatatgggtcgtcgatcgacatggatgagcgatgatgatatccgtttaggctgggcggtgatagcttctcgttcaggcagtacgcctcttttcttttccagacctgagggaggcggaaatggtgtgaggttccccagatctgggggaaaagccaaataggcgatcgcgggagtgctttatttgaagatcaggctatcactgcggtcaatagatttcacaatgtgatggctggacagcctgaggaactctcgaacccgaatggaaacaaccagatatttatgaatcagcgcggctcacatggcgttgtgctggcaaatgcaggttcatcctctgtctctatcaatacggcaacaaaattgcctgatggcaggtatgacaataaagctggagcgggttcatttcaagtgaacgatggtaaactgacaggcacgatcaatgccaggtctgtagctgtgctttatcctgatgatattgcaaaagcgcctcatgttttccttgagaattacaaaacaggtgtaacacattctttcaatgatcaactgacgattaccttgcgtgcagatgcgaatacaacaaaagccgtttatcaaatcaataatggaccagacgacaggcgtttaaggatggagatcaattcacaatcggaaaaggagatccaatttggcaaaacatacaccatcatgttaaaaggaacgaacagtgatggtgtaacgaggaccgagaaatacagttttgttaaaagagatccagcgtcggccaaaaccatcggctatcaaaatccgaatcattggagccaggtaaatgcttatatctataaacatgatgggagccgagtaattgaattgaccggatcttggcctggaaaaccaatgactaaaaatgcagacggaatttacacgctgacgctgcctgcggacacggatacaaccaacgcaaaagtgatttttaataatggcagcgcccaagtgcccggtcagaatcagcctggctttgattacgtgctaaatggtttatataatgactcgggcttaagcggttctcttcccc

SEQ ID NO: 86 - DNA, 79 bp, Artificial Sequence
  Chemically synthesized oligonucleotide GFP Cpf1 cTAG M fwd
cagcacctggattaccctgttatccctagttttgggttaaagatggttaaatgattcgaaaataataaagggaaaatca

SEQ ID NO: 87 - DNA, 79 bp, Artificial Sequence
  Chemically synthesized oligonucleotide GFP Cpf1 cTAG N fwd
cagcacctggattaccctgttatccctagttttgggatgttaagagtccctatcttcgaaaataataaagggaaaatca

SEQ ID NO: 88 - DNA, 81 bp, Artificial Sequence
  Chemically synthesized oligonucleotide GFP Cpf1 cTAG P  fwd
cagcacctggattaccctgttatccctagttttgaggagtgttcagtctccgtgaactcgaaaataataaagggaaaatca

SEQ ID NO: 89 - DNA, 79 bp, Artificial Sequence
  Chemically synthesized oligonucleotide GFP Cpf1 cTAG O rvs
cgcttcctcctgaaaatgcagctaggtagttttgaccgccccccccataccccaatcgacatgccgaactcagaagtga

SEQ ID NO: 90 - DNA, 79 bp, Artificial Sequence
  Chemically synthesized oligonucleotide GFP Cpf1 cTAG N rvs
cgcttcctcctgaaaatgcagctaggtagttttgggatgttaagagtccctatcttcgacatgccgaactcagaagtga

SEQ ID NO: 91 - DNA, 51 bp, Artificial Sequence
  Chemically synthesized oligonucleotide CAT01 Cpf1 cTAG M fwd
tttgggttaaagatggttaaatgattcgacatacacataaagtagcttgcg

SEQ ID NO: 92 - DNA, 51 bp, Artificial Sequence
  Chemically synthesized oligonucleotide CAT01 Cpf1 cTAG N fwd
tttgggatgttaagagtccctatcttcgacatacacataaagtagcttgcg

SEQ ID NO: 93 - DNA, 53 bp, Artificial Sequence
  Chemically synthesized oligonucleotide CAT01 Cpf1 cTAG P fwd
tttgaggagtgttcagtctccgtgaactcgacatacacataaagtagcttgcg

SEQ ID NO: 94 - DNA, 49 bp, Artificial Sequence
  Chemically synthesized oligonucleotide CAT01 Cpf1 cTAG N rvs
tttgggatgttaagagtccctatcttcgactggaaggacaagggggacc

SEQ ID NO: 95 - DNA, 49 bp, Artificial Sequence
  Chemically synthesized oligonucleotide CAT01 Cpf1 cTAG O rvs
tttgaccgccccccccataccccaatcgactggaaggacaagggggacc

SEQ ID NO: 96 - DNA, 25 bp, Artificial Sequence
  Chemically synthesized oligonucleotide Cpf1 cTAG M
tttgggttaaagatggttaaatgat

SEQ ID NO: 97 - DNA, 25 bp, Artificial Sequence
  Chemically synthesized oligonucleotide Cpf1 cTAG N
tttgggatgttaagagtccctatct

SEQ ID NO: 98 - DNA, 25 bp, Artificial Sequence
  Chemically synthesized oligonucleotide Cpf1 cTAG O
tttgaccgccccccccataccccaa

SEQ ID NO: 99 - DNA, 27 bp, Artificial Sequence
  Chemically synthesized oligonucleotide Cpf1 cTAG P
tttgaggagtgttcagtctccgtgaac

SEQ ID NO: 100 - DNA, 5093 bp, Artificial Sequence
  Synthetically constructed plasmid pZHR039 (Kanamycin resistance, GFP)
actacctagctgcattttcaggaggaagcgatgggcggccgcacaccttctatgcggtgtgaaataccgccatgaccaaaatcccttaacgtgagttttcgttccactgagcgtcagaccccgtagaaaagatcaaaggatcttcttgagatcctttttttctgcgcgtaatctgctgcttgcaaacaaaaaaaccaccgctaccagcggtggtttgtttgccggatcaagagctaccaactctttttccgaaggtaactggcttcagcagagcgcagataccaaatactgttcttctagtgtagccgtagttaggccaccacttcaagaactctgtagcaccgcctacatacctcgctctgctaatcctgttaccagtggctgctgccagtggcgataagtcgtgtcttaccgggttggactcaagacgatagttaccggataaggcgcagcggtcgggctgaacggggggttcgtgcacacagcccagcttggagcgaacgacctacaccgaactgagatacctacagcgtgagctatgagaaagcgccacgcttcccgaagggagaaaggcggacaggtatccggtaagcggcagggtcggaacaggagagcgcacgagggagcttccagggggaaacgcctggtatctttatagtcctgtcgggtttcgccacctctgacttgagcgtcgatttttgtgatgctcgtcaggggggcggagcctatggaaaaacgccagcaacgcggcctttttacggttcctggccttttgctggccttttgctcacatgttctttcctgcgttatcccctgattctgtggataaccgtattaccgcctttgagtgagctgataccgctcgccgcagccgaacgaccgagcgcagcgagtcagtgagcgaggaagcggaagagcgcccaatacgcaaaccgcctctccccgcgcgttggccgattcattaatgcagctggcacgacaggtttcccgactggaaagcgggcagtgagcgcaacgcaattaatgtgagttagctcactcattaggcaccccaggctttacactgataatgggtgagtgagtgtgtgcgtgtggggcgcgccagatgggaacagctagcttcacgctgccgcaagcactcagggcgcaagggctgctaaaggaagcggaacacgtagaaagccagtccgcagaaacggtgctgaccccggatgaatgtcagctactgggctatctggacaagggaaaacgcaagcgcaaagagaaagcaggtagcttgcagtgggcttacatggcgatagctagactgggcggttttatggacagcaagcgaaccggaattgccagctggggcgccctctggtaaggttgggaagccctgcaaagtaaactggatggctttcttgccgccaaggatctgatggcgcaggggatcaagatctgatcaagagacaggatgaggatcgtttcgcatgattgaacaagatggattgcacgcaggttctccggccgcttgggtggagaggctattcggctatgactgggcacaacagacaatcggctgctctgatgccgccgtgttccggctgtcagcgcaggggcgcccggttctttttgtcaagaccgacctgtccggtgccctgaatgaactccaagacgaggcagcgcggctatcgtggctggccacgacgggcgttccttgcgcagctgtgctcgacgttgtcactgaagcgggaagggactggctgctattgggcgaagtgccggggcaggatctcctgtcatctcaccttgctcctgccgagaaagtatccatcatggctgatgcaatgcggcggctgcatacgcttgatccggctacctgcccattcgaccaccaagcgaaacatcgcatcgagcgagcacgtactcggatggaagccggtcttgtcgatcaggatgatctggacgaagagcatcaggggctcgcgccagccgaactgttcgccaggctcaaggcgcggatgcccgacggcgaggatctcgtcgtgacccatggcgatgcctgcttgccgaatatcatggtggaaaatggccgcttttctggattcatcgactgtggccggctgggtgtggcggaccgctatcaggacatagcgttggctacccgtgatattgctgaagagcttggcggcgaatgggctgaccgcttcctcgtgctttacggtatcgccgctcccgattcgcagcgcatcgccttctatcgccttcttgacgagttcttctgagcgggactctggggttcgctagaggatcgatcctttttaacccatcacatatacctgccgttcactattatttagtgaaatgagatattatgatattttctgaattgtgattaaaaaggcaactttatgcccatgcaacagaaactataaaaaatacagagaatgaaaagaaacagatagattttttagttctttaggcccgtagtctgcaaatccttttatgattttctatcaaacaaaagaggaaaatagaccagttgcaatccaaacgagagtctaatagaatgaggtcgaaaagtaaatcgcgcgggtttgttactgataaagcaggcaagacctaaaatgtgtaaagggcaaagtgtatactttggcgtcaccccttacatattttaggtctttttttattgtgcgtaactaacttgccatcttcaaacaggagggctggaagaagcagaccgctaacacagtacataaaaaaggagacatgaacgactccagtctttctagaagatggcaaacagctattatgggtattatgggtccccgaagcagggttatgcagcggaaaagctccccgaaaagtgccacctgggtccttttcatcacgtgctataaaaataattataatttaaattttttaatataaatatataaattaaaaatagaaagtaaaaaaagaaattaaagaaaaaatagtttttgttttccgaagatgtaaaagactctagggggatcgccaacaaatactaccttttatcttgctcttcctgctctcaggtattaatgccgaattgtttcatcttgtctgtgtagaagaccacacacgaaaatcctgtgattttacattttacttatcgttaatcgaatgtatatctatttaatctgcttttcttgtctaataaatatatatgtaaagtacgctttttgttgaaattttttaaacctttgtttatttttttttcttcattccgtaactcttctaccttctttatttactttctaaaatccaaatacaaaacataaaaataaataaacacagagtaaattcccaaattattccatcattaaaagatacgaggcgcgtgtaagttacaggcaagcgatccgtcctaagaaaccattattatcatgacattaacctataaaaataggcgtatcacgaggccctttcgtctcgcgcgtttcggtgatgacggtgaaaacctctgacacatgcagctcccggagacggtcacagcttgtctgtaagcggatgccgggagcagacaagcccgtcagggcgcgtcagcgggtgttggcgggtgtcggggctggcttaactatgcggcatcagagcagattgtactgagagtgcaccataccacagccggaagaggagtagggaatattactggctgaaaataagtcttgaatgaacgtatacgcgtatatttctaccaatctctcaacactgagtaatggtagttataagaaagagaccgagttagggacagttagaggcggtggagatattccttatggcatgtctggcgatgataaaacttttcaaacggcagccccgatctaaaagagctgacagggaaatggtcagaaaaagaaacgtgcacccgcccgtctggacgcgccgctcacccgcacggcagagaccaatcagtaaaaatcaacggttaacgacattactatatatataatataggaagcatttaatagaacagcatcgtaatatatgtgtactttgcagttatgacgccagatggcagtagtggaagatattctttattgaaaaatagcttgtcaccttacgtacaatcttgatccggagcttttctttttttgccgattaagaattcggtcgaaaaaagaaaaggagagggccaagagggagggcattggtgactattgagcacgtgagtatacgtgattaagcacacaaaggcagcttggagtatgtctgttattaatttcacaggtagttctggtccattggtgaaagtttgcggcttgcagagcacagaggccgcagaatgtgctctagattccgatgctgacttgctgggtattatatgtgtgcccaatagaaagagaacaattgacccggttattgcaaggaaaatttcaagtcttgtaaaagcatataaaaatagttcaggcactccgaaatacttggttggcgtgtttcgtaatcaacctaaggaggatgttttggctctggtcaatgattacggcattgatatcgtccaactgcatggagatgagtcgtggcaagaataccaagagttcctcggtttgccagttattaaaagactcgtatttccaaaagactgcaacatactactcagtgcagcttcacagaaacctcattcgtttattcccttgtttgattcagaagcaggtgggacaggtgaacttttggattggaactcgatttctgactgggttggaaggcaagagagccccgaaagcttacattttatgttagctggtggactgacgccagaaaatgttggtgatgcgcttagattaaatggcgttattggtgttgatgtaagcggaggtgtggagacaaatggtgtaaaagactctaacaaaatagcaaatttcgtcaaaaatgctaagaaataggttattactgagtagtatttatttaagtattgtttgtgcacttgcctgcaggccttttgaaaagcaagcataaaagatctaaacataaaatctgtaaaataacaagatgtaaagataatgctaaatcatttggctttttgattgattgtacaggactgggtggaatcccttctgcagcacctggattaccctgttatccctagt

SEQ ID NO: 101 - DNA, 13737 bp, Artificial Sequence
  Synthetically constructed plasmid 13000223370 Cat01 (Chloramphenicol source)
gaatcttatcccatggctaagaaagtagacacctcgaacgctacccccgctctagcccttcttacggagaggcaaattccttttgagctggatgttcatgatgtagatccaaaatcatcaaagggcttcgcattggatgcctctgaagtaatgggtgtggagccggaagtggtgtttaaaacgctcatggcagatattgatggtgaacacgtggtcgcgattgttccagccagcagcacgttgaatctcaagcagttggctaaggctggaaaaggtaagcatgcaaacatgatggatcgcagccgtgcacaggtagtcacggggtatgtccctggtggaatctcaccgatagggcagaagaataagcaccgcgtgtttttggatgagtctgcaattctccaggagcgaatctacgtcagcgcaggacgccgaggctggtcactgattatcgccccggatgatgttcttctggctaccgatggggtttacgcggatattgctgatcattcataaaaggtaaaacccacccccgcaggggtgcgtcgtaaagcaagctccttttcttagtacggcgcgatagtggactcgtgcgcgtcgatgttgatgcggccgtgcacggacgggaatgcgcgctgcgcgcagttctcgcgggtgcacactcggcagccggacccgatgggggtggcggtggataggtcctggaggttgaagccgcgggagtacacggtgcggtcggcgtggcgcgcttcgcagccgagcccgatggcgaacattttgtccacttcgccgaaccgggcttcgtggtgtcgcacggtgcgtgagatccacaggtagttgcgtccgtcgggcatttgcgcgaattggcggagcacttggccggggttggtgaaggtttcaaacacgttccacagggggcaggtgccgccgtagtgggtgaagtggaagccggtggcggattggcgtttggacatgttgccggcgcggtcgacgcgcacgaaggtaaacgggatgccgcgcaggttgggacgctgcagggtggacaggcggtgggcggtcgtctcgtagcccacgccgaaaagctgacctaggtattcgatgtcgtagccggatttttcggcctcggagtggaagattttgtagggcagcattacggcggcggcgaagtaggaggcgacgccgcggatggctagggtgcgggcttcgggggtggaccagatgccgtcgtcgacgatgccttcgatgaggtcgttggcttctaggtagccgagttcggtggccatgcggaaggcgcgttgtccggggttgaggcgtgcgtggattgtcagtaggcgcgtctcggggtcaaagtggtgcagcgtgccggattcctctttggaggaggtgatggtgacatcgtgatccatttgcaggcgcctggcgatcgaatcttccatggcgcgggaatcgtacggctgccagcccagttgcgcggcgatggcttcggcgcggcggtcgagcgcatcgaagtagttttggcgggcgtaaatgaaatcgcgcacctcttcgtgcggcatgctcacggcctccgcgatggggcgacgttcctcaggcgtgttggtgcgattgtccactgcgatggagaacttgtcgcgtacgtttcggtagcgctggtgcatttccaccatggcgcgcgccagctgcgggtggttgtacaccatctccgatagctcttggagctccacgttcgcggggttgatctcccggtccaacatgacatcctgaacttcagctaaaaggcgggaatcatcgtcgcgggagaaaaacgttgcgtctacgccgaacgcctcggtgatgcgcaataacaccggtacggtgagcgggcgtacgtcgtgctcaatctgatttacataactggcagataagccaagggttgctgccaacgacgcctggctcaggtctctttcgcggcgcagttggcgcagcctggaccccacatatgtctttcccatggcgcaactatagcgtgatcaccatcaccttaaccactcttggcattgaggtgttgcaaacctcagaggctaaagaacaagggcttactgtgcgcagaggtgccctcaccggggtcaaaaatttgacatccggtgagggtaataccagcacagcctagtctcgccagaatgctggtcagcatacgaaagagcttaaggcaggccaattcgcactgtcagggtcacttgggtgtttagcactaccgacaggtacgctagtatgcgttcttcctaccagaggtctgtggccgcgtggtcaaaagtgcggctttcgtatttgctgctcgtgtttactctcacacttagctttgacctgcacaaatagttgcaaattgtcccacatacacataaagtagcttgcgtatttaaaattatgaacctaaggggtttagcacttcacgctgccgcaagcactcagggcgcaagggctgctaaaggaagcggaacacgtagaaagccagtccgcagaaacggtgctgaccccggatgaatgtcagctactgggctatctggacaagggaaaacgcaagcgcaaagagaaagcaggtagcttgcagtgggcttacatggcgatagctagactgggcggttttatggacagcaagcgaaccggaattgccagctggggcgccctctggtaaggttgggaagccctgcaaagtaaactggatggctttcttgccgccaaggatctgatggcgcaggggatcaagatctgatcaagagacaggatgaggatcgtttcgcatggagaaaaagatcacgggctacactaccgtggacatctcgcaatggcatcgcaaggaacacttcgaggcatttcaaagcgtggcacaatgtacttacaaccagaccgtccagctggatattaccgcgtttttgaagaccgttaagaaaaacaagcacaagttttatccagcctttatccatattctcgcccgcttgatgaatgcgcaccccgaatttcgtatggccatgaaagatggtgagctcgttatctgggactcagtccatccatgctataccgttttccacgaacaaactgaaactttttcttcgctgtggtccgaatatcacgatgatttccgccaatttttgcatatctacagccaagatgtcgcgtgctatggtgaaaacctggcttactttcccaagggattcatcgagaatatgttctttgtttcagcaaacccctgggtgtccttcacgtcgtttgacttgaacgtggccaatatggataatttcttcgctccagttttcaccatgggtaagtactatacccaaggagacaaggtccttatgccacttgcaatccaagtacaccacgcagtctgcgatggtttccatgtgggacgcatgcttaacgaactccaacagtactgtgatgaatggcaaggcggcgcgtagccccccaaccgaagttgaggggatttttgaatcctcggtcccccttgtccttccagattgatcgacgcgttgttgattttcgcttttcgacgcagcccgccgccatcgggtgcccggcgtggtcaggccacatgcgccccgggaactttttgggcacctacggtgcaacagttgcgaaaattgtgtcacctgcgcaaagccttgcttctattcgggaaattcgggtgtctaaactttttggttgataccaaacggggttagaaactgttcagatcggtatcctgtgaggaagctcaccttggttttagaatgttgaaaaagcctcacgtttccgcaggtagagcacactcaattaaatgagcgtcaaacgacaataaagtaaggctaccctaataactggggttttatgcctctaaacagtcagttgggggcggtaggggagcgtcccatgactggttaatgcctcgatctgggacgtacagtaacagcgacactggaggtgccatgactgttagaaatcccgaccgtgaggcaatccgtcacggaaaaattacgacggaggcgctgcgtgagcgtcccgcatacccgacctgggcaatgaagctgaccatggccatcactggcctaatcttcggtggcttcgttcttgttcacatgatcggaaacctgaaaatcttcatgccggactacgcagccgattctgcgcatccgggtgaagcacaagtagatgtctacggcgagttcctgcgtgagatcggatccccgatcctcccacacggctcagtcctctggatcctacgtattatcctgctggtcgcattggttctgcacatctactgtgcattcgcattgaccggccgttctcaccagtcccgcggaaagttccgccgtaccaacctcgttggcggcttcaactccttcgcgacccgctccatgctggtgaccggaatcgttctccttgcgttcattatcttccacatcctcgacctgaccatgggtgttgctccagcagccccaacttcattcgagcacggcgaagtatacgcaaatatggtggcttcctttagccgctggcctgtagcaatttggtacatcattgccaacctggtcctgttcgtccacctgtctcacggcatctggcttgcagtctctgacctgggaatcaccggacgtcgctggagggcaatcctcctcgcagttgcgtacatcgttcctgcactggtcctgatcggcaacatcaccattccgttcgccatcgctgttggctggattgcgtaaaggttaggaagaatttatgagcactcactctgaaaccacccgcccagagttcatccacccagtctcagtcctcccagaggtctcagctggtacggtccttgacgctgctgagccagcaggcgttcccaccaaagatatgtgggaataccaaaaagaccacatgaacctggtctccccactgaaccgacgcaagttccgcgtcctcgtcgttggcaccggcctgtccggtggcgctgcagcagcagccctcggcgaactcggatacgacgtcaaggcgttcacctaccacgacgcacctcgccgtgcgcactccattgctgcacagggtggcgttaactccgcccgcggcaagaaggtagacaacgacggcgcataccgccacgtcaaggacaccgtcaagggcggcgactaccgtggccgcgagtccgactgctggcgtctcgccgtcgagtccgtccgcgtcatcgaccacatgaacgccatcggtgcaccattcgcccgcgaatacggtggcgccttggcaacccgttccttcggtggtgtgcaggtctcccgtacctactacacccgtggacaaaccggacagcagctgcagctctccaccgcatccgcactacagcgccagatccacctcggctccgtagagatcttcacccataacgaaatggttgacgtaattgtcaccgaacgtaatggtgaaaagcgctgcgaaggcctgatcatgcgcaacctgatcaccggcgagctcaccgcacacaccggccatgccgttatcctggcaaccggtggctacggcaacgtgtaccacatgtccaccctggcgaagaactccaacgcctctagggataacagggtaatacgtcgtgactgggaaaaccctggcgttacccaacttaatcgccttgcagcacatccccctttcgccagctggcgtaatagcgaagaggcccgcaccgatcgcccttcccaacagttgcgcagcctgaatggcgaatggcgataagctagcttcacgctgccgcaagcactcagggcgcaagggctgctaaaggaagcggaacacgtagaaagccagtccgcagaaacggtgctgaccccggatgaatgtcagctactgggctatctggacaagggaaaacgcaagcgcaaagagaaagcaggtagcttgcagtgggcttacatggcgatagctagactgggcggttttatggacagcaagcgaaccggaattgccagctggggcgccctctggtaaggttgggaagccctgcaaagtaaactggatggctttcttgccgccaaggatctgatggcgcaggggatcaagatctgatcaagagacaggatgaggatcgtttcgcatgattgaacaagatggattgcacgcaggttctccggccgcttgggtggagaggctattcggctatgactgggcacaacagacaatcggctgctctgatgccgccgtgttccggctgtcagcgcaggggcgcccggttctttttgtcaagaccgacctgtccggtgccctgaatgaactccaagacgaggcagcgcggctatcgtggctggccacgacgggcgttccttgcgcagctgtgctcgacgttgtcactgaagcgggaagggactggctgctattgggcgaagtgccggggcaggatctcctgtcatctcaccttgctcctgccgagaaagtatccatcatggctgatgcaatgcggcggctgcatacgcttgatccggctacctgcccattcgaccaccaagcgaaacatcgcatcgagcgagcacgtactcggatggaagccggtcttgtcgatcaggatgatctggacgaagagcatcaggggctcgcgccagccgaactgttcgccaggctcaaggcgcggatgcccgacggcgaggatctcgtcgtgacccatggcgatgcctgcttgccgaatatcatggtggaaaatggccgcttttctggattcatcgactgtggccggctgggtgtggcggaccgctatcaggacatagcgttggctacccgtgatattgctgaagagcttggcggcgaatgggctgaccgcttcctcgtgctttacggtatcgccgctcccgattcgcagcgcatcgccttctatcgccttcttgacgagttcttctgagcgggactctggggttcgctagaggatcgatcctttttaacccatcacatatacctgccgttcactattatttagtgaaatgagatattatgatattttctgaattgtgattaaaaaggcaactttatgcccatgcaacagaaactataaaaaatacagagaatgaaaagaaacagatagattttttagttctttaggcccgtagtctgcaaatccttttatgattttctatcaaacaaaagaggaaaatagaccagttgcaatccaaacgagagtctaatagaatgaggtcgaaaagtaaatcgcgcgggtttgttactgataaagcaggcaagacctaaaatgtgtaaagggcaaagtgtatactttggcgtcaccccttacatattttaggtctttttttattgtgcgtaactaacttgccatcttcaaacaggagggctggaagaagcagaccgctaacacagtacataaaaaaggagacatgaacgtgagctgtttacaattaatcatcgtgtggtaccatgtgtggaattggaaaggacatgaacatcaaaaagtttgcaaaacaagcaacagtattaacctttactaccgcactgctggcaggaggcgcaactcaagcgtttgcgaaagaaacgaaccaaaagccatataaggaaacatacggcatttcccatattacacgccatgatatgctgcaaatccctgaacagcaaaaaaatgaaaaatatcaagtttctgaatttgattcgtccacaattaaaaatatctcttctgcaaaaggcctggacgtttgggacagctggccattacaaaacgctgacggcactgtcgcaaactatcacggctaccacatcgtctttgcattagccggagatcctaaaaatgcggatgacacatcgatttacatgttctatcaaaaagtcggcgaaacttctattgacagctggaaaaacgctggccgcgtctttaaagacagcgacaaattcgatgcaaatgattctatcctaaaagaccaaacacaagaatggtcaggttcagccacatttacatctgacggaaaaatccgtttattctacactgatttctccggtaaacattacggcaaacaaacactgacaactgcacaagttaacgtatcagcatcagacagctctttgaacatcaacggtgtagaggattataaatcaatctttgacggtgacggaaaaacgtatcaaaatgtacagcagttcatcgatgaaggcaactacagctcaggcgacaaccatacgctgagagatcctcactacgtagaagataaaggccacaaatacttagtatttgaagcaaacactggaactgaagatggctaccaaggcgaagaatctttatttaacaaagcatactatggcaaaagcacatcattcttccgtcaagaaagtcaaaaacttctgcaaagcgataaaaaacgcacggctgagttagcaaacggcgctctcggtatgattgagctaaacgatgattacacactgaaaaaagtgatgaaaccgctgattgcatctaacacagtaacagatgaaattgaacgcgcgaacgtctttaaaatgaacggcaaatggtacctgttcactgactcccgcggatcaaaaatgacgattgacggcattacgtctaacgatatttacatgcttggttatgtttctaattctttaactggcccatacaagccgctgaacaaaactggccttgtgttaaaaatggatcttgatcctaacgatgtaacctttacttactcacacttcgctgtacctcaagcgaaaggaaacaatgtcgtgattacaagctatatgacaaacagaggattctacgcagacaaacaatcaacgtttgcgccgagcttcctgctgaacatcaaaggcaagaaaacatctgttgtcaaagacagcatccttgaacaaggacaattaacagttaacaaataaaaacgcaaaagaaaatgccgatgggtaccgagcgaaatgaccgaccaagcgacgcccaacctgccatcacgagatttcgattccaccgccgccttctatgaaaggttgggcttcggaatcgttttccgggacgccctcgcggacgtgctcatagtccaataactacattgagcgaaatgccaaccacatgtcccatgcttttactaatgtggggtcttagaagaaagcgaccaatttaaggagagttgaatatgtctgaaatccagctgacggaggcatcattgaacgaagcagccgatgctgcaattaaagcgttcgatggagcacaaaacctcgatgaattggctgctctgcgacgagatcacctgggtgatgcggcaccaatccctcaggcacgccgctcgcttggaaccattccaaaagatcagcgtaaggatgccggacgattcgtaaacatggcgctgggccgcgcggaaaagcacttcgcccaggttaaggtggttcttgaagaaaagcgaaacgcagaagtcctggagctggagcgcgtggatgttaccgtccctaccacacgtgaacaagtcggcgcactgcacccaattacgattctcaacgaacagatcgcggacatctttgttggcatgggctgggagatcgcagagggcccggaagttgaagccgaatacttcaatttcgatgcacttaactttctcccagaccacccagcccgcaccctgcaggataccttccacatcgcacctgaaggatcgcgccaagtgttgcgcacccatacctctcctgtccaggttcgcacgatgctgaatcgagaggtacctatctatatcgcctgtcctggtcgcgtcttccgcactgacgaattggatgctacccacacccctgtctttcaccagatcgagggcctggctgtcgacaaaggcctgacaatggctcaccttcgcggaactctggatcacttggctaaagaactgttcggacctgagactaaaacccgcatgcgttcaaactacttcccattttctgagcccagcgcggaagttgatgtctggttcccaaataagaagggcggtgccggctggatcgaatggggcggctgcggcatggtcaacccaaacgtgctccgcgctgtaggcgtcgacccggaagaatacactggattcggcttcggtatgggtattgaacgcaccttgcaattccgaaatggactctcagatatgcgcgatatggtagaaggcgacattcgctttaccctccctttcggcattcaggcttaggcatttttagtacgtgcaataaccactctggtttttccagggtggttttttgatgccctttttggagtcttcaactgagcctcgcagagcaggattcccgttgagcaccgccaggtgcgaataagggacagtgaagaaggaacacccgctcgcgggtgggcctacttcacctatcctgcccggctgacgccgttggatacaccaaggaaagtctacacgaaccctttggcaaaatcctgtatatcgtgcgaaaaaggatggatataccgaaaaaatcgctataatgaccccgaagcagggttatgcagcggaaaagctccccgaaaagtgccacctgggtccttttcatcacgtgctataaaaataattataatttaaattttttaatataaatatataaattaaaaatagaaagtaaaaaaagaaattaaagaaaaaatagtttttgttttccgaagatgtaaaagactctagggggatcgccaacaaatactaccttttatcttgctcttcctgctctcaggtattaatgccgaattgtttcatcttgtctgtgtagaagaccacacacgaaaatcctgtgattttacattttacttatcgttaatcgaatgtatatctatttaatctgcttttcttgtctaataaatatatatgtaaagtacgctttttgttgaaattttttaaacctttgtttatttttttttcttcattccgtaactcttctaccttctttatttactttctaaaatccaaatacaaaacataaaaataaataaacacagagtaaattcccaaattattccatcattaaaagatacgaggcgcgtgtaagttacaggcaagcgatccgtcctaagaaaccattattatcatgacattaacctataaaaataggcgtatcacgaggccctttcgtctcgcgcgtttcggtgatgacggtgaaaacctctgacacatgcagctcccggagacggtcacagcttgtctgtaagcggatgccgggagcagacaagcccgtcagggcgcgtcagcgggtgttggcgggtgtcggggctggcttaactatgcggcatcagagcagattgtactgagagtgcaccataccacagccggaagaggagtagggaatattactggctgaaaataagtcttgaatgaacgtatacgcgtatatttctaccaatctctcaacactgagtaatggtagttataagaaagagaccgagttagggacagttagaggcggtggagatattccttatggcatgtctggcgatgataaaacttttcaaacggcagccccgatctaaaagagctgacagggaaatggtcagaaaaagaaacgtgcacccgcccgtctggacgcgccgctcacccgcacggcagagaccaatcagtaaaaatcaacggttaacgacattactatatatataatataggaagcatttaatagaacagcatcgtaatatatgtgtactttgcagttatgacgccagatggcagtagtggaagatattctttattgaaaaatagcttgtcaccttacgtacaatcttgatccggagcttttctttttttgccgattaagaattcggtcgaaaaaagaaaaggagagggccaagagggagggcattggtgactattgagcacgtgagtatacgtgattaagcacacaaaggcagcttggagtatgtctgttattaatttcacaggtagttctggtccattggtgaaagtttgcggcttgcagagcacagaggccgcagaatgtgctctagattccgatgctgacttgctgggtattatatgtgtgcccaatagaaagagaacaattgacccggttattgcaaggaaaatttcaagtcttgtaaaagcatataaaaatagttcaggcactccgaaatacttggttggcgtgtttcgtaatcaacctaaggaggatgttttggctctggtcaatgattacggcattgatatcgtccaactgcatggagatgagtcgtggcaagaataccaagagttcctcggtttgccagttattaaaagactcgtatttccaaaagactgcaacatactactcagtgcagcttcacagaaacctcattcgtttattcccttgtttgattcagaagcaggtgggacaggtgaacttttggattggaactcgatttctgactgggttggaaggcaagagagccccgaaagcttacattttatgttagctggtggactgacgccagaaaatgttggtgatgcgcttagattaaatggcgttattggtgttgatgtaagcggaggtgtggagacaaatggtgtaaaagactctaacaaaatagcaaatttcgtcaaaaatgctaagaaataggttattactgagtagtatttatttaagtattgtttgtgcacttgcctgcaggccttttgaaaagcaagcataaaagatctaaacataaaatctgtaaaataacaagatgtaaagataatgctaaatcatttggctttttgattgattgtacaggtatgcggtgtgaaataccgccatgaccaaaatcccttaacgtgagttttcgttccactgagcgtcagaccccgtagaaaagatcaaaggatcttcttgagatcctttttttctgcgcgtaatctgctgcttgcaaacaaaaaaaccaccgctaccagcggtggtttgtttgccggatcaagagctaccaactctttttccgaaggtaactggcttcagcagagcgcagataccaaatactgttcttctagtgtagccgtagttaggccaccacttcaagaactctgtagcaccgcctacatacctcgctctgctaatcctgttaccagtggctgctgccagtggcgataagtcgtgtcttaccgggttggactcaagacgatagttaccggataaggcgcagcggtcgggctgaacggggggttcgtgcacacagcccagcttggagcgaacgacctacaccgaactgagatacctacagcgtgagctatgagaaagcgccacgcttcccgaagggagaaaggcggacaggtatccggtaagcggcagggtcggaacaggagagcgcacgagggagcttccagggggaaacgcctggtatctttatagtcctgtcgggtttcgccacctctgacttgagcgtcgatttttgtgatgctcgtcaggggggcggagcctatggaaaaacgccagcaacgcggcctttttacggttcctggccttttgctggccttttgctcacatgttctttcctgcgttatcccctgattctgtggataaccgtattaccgcctttgagtgagctgataccgctcgccgcagccgaacgaccgagcgcagcgagtcagtgagcgaggaagcggaagagcgcccaatacgcaaaccgcctctccccgcgcgttggccgattcattaatgcagctggcacgacaggtttcccgactggaaagcgggcagtgagcgcaacgcaattaatgtgagttagctcactcattaggcaccccaggctttacactttatgcttccggctcgtatgttgtgtggaattgtgagcggataacaatttaactataacggtcctaaggtagcgaa

SEQ ID NO: 102 - DNA, 6351 bp, Artificial Sequence
  Synthetically constructed plasmid pJDI427
ttgagatcctttttttctgcgcgtaatctgctgcttgcaaacaaaaaaaccaccgctaccagcggtggtttgtttgccggatcaagagctaccaactctttttccgaaggtaactggcttcagcagagcgcagataccaaatactgttcttctagtgtagccgtagttaggccaccacttcaagaactctgtagcaccgcctacatacctcgctctgctaatcctgttaccagtggctgctgccagtggcgataagtcgtgtcttaccgggttggactcaagacgatagttaccggataaggcgcagcggtcgggctgaacggggggttcgtgcacacagcccagcttggagcgaacgacctacaccgaactgagatacctacagcgtgagctatgagaaagcgccacgcttcccgaagggagaaaggcggacaggtatccggtaagcggcagggtcggaacaggagagcgcacgagggagcttccagggggaaacgcctggtatctttatagtcctgtcgggtttcgccacctctgacttgagcgtcgatttttgtgatgctcgtcaggggggcggagcctatggaaaaacgccagcaacgcggcctttttacggttcctggccttttgctggccttttgctcacatgttctttcctgcgttatcccctgattctgtggataaccgtattaccgcctttgagtgagctgataccgctcgccgcagccgaacgaccgagcgcagcgagtcagtgagcgaggaagcggaagagcgcccaatacgcaaaccgcctctccccgcgcgttggccgattcattaatgcagctggcacgacaggtttcccgactggaaagcgggcagtgagcgcaacgcaattaatgtgagttagctcactcattaggcaccccaggctttacactgataatgggtgagtgagtgtgtgcgtgtggggcgcgccagatgggaacagctagcttcacgctgccgcaagcactcagggcgcaagggctgctaaaggaagcggaacacgtagaaagccagtccgcagaaacggtgctgaccccggatgaatgtcagctactgggctatctggacaagggaaaacgcaagcgcaaagagaaagcaggtagcttgcagtgggcttacatggcgatagctagactgggcggttttatggacagcaagcgaaccggaattgccagctggggcgccctctggtaaggttgggaagccctgcaaagtaaactggatggctttcttgccgccaaggatctgatggcgcaggggatcaagatctgatcaagagacaggatgaggatcgtttcgcatgattgaacaagatggattgcacgcaggttctccggccgcttgggtggagaggctattcggctatgactgggcacaacagacaatcggctgctctgatgccgccgtgttccggctgtcagcgcaggggcgcccggttctttttgtcaagaccgacctgtccggtgccctgaatgaactccaagacgaggcagcgcggctatcgtggctggccacgacgggcgttccttgcgcagctgtgctcgacgttgtcactgaagcgggaagggactggctgctattgggcgaagtgccggggcaggatctcctgtcatctcaccttgctcctgccgagaaagtatccatcatggctgatgcaatgcggcggctgcatacgcttgatccggctacctgcccattcgaccaccaagcgaaacatcgcatcgagcgagcacgtactcggatggaagccggtcttgtcgatcaggatgatctggacgaagagcatcaggggctcgcgccagccgaactgttcgccaggctcaaggcgcggatgcccgacggcgaggatctcgtcgtgacccatggcgatgcctgcttgccgaatatcatggtggaaaatggccgcttttctggattcatcgactgtggccggctgggtgtggcggaccgctatcaggacatagcgttggctacccgtgatattgctgaagagcttggcggcgaatgggctgaccgcttcctcgtgctttacggtatcgccgctcccgattcgcagcgcatcgccttctatcgccttcttgacgagttcttctgagcgggactctggggttcgctagaggatcgatcctttttaacccatcacatatacctgccgttcactattatttagtgaaatgagatattatgatattttctgaattgtgattaaaaaggcaactttatgcccatgcaacagaaactataaaaaatacagagaatgaaaagaaacagatagattttttagttctttaggcccgtagtctgcaaatccttttatgattttctatcaaacaaaagaggaaaatagaccagttgcaatccaaacgagagtctaatagaatgaggtcgaaaagtaaatcgcgcgggtttgttactgataaagcaggcaagacctaaaatgtgtaaagggcaaagtgtatactttggcgtcaccccttacatattttaggtctttttttattgtgcgtaactaacttgccatcttcaaacaggagggctggaagaagcagaccgctaacacagtacataaaaaaggagacatgaacgactccagtctttctagaagatggcaaacagctattatgggtattatgggtccccgaagcagggttatgcagcggaaaagctccccgaaaagtgccacctgggtccttttcatcacgtgctataaaaataattataatttaaattttttaatataaatatataaattaaaaatagaaagtaaaaaaagaaattaaagaaaaaatagtttttgttttccgaagatgtaaaagactctagggggatcgccaacaaatactaccttttatcttgctcttcctgctctcaggtattaatgccgaattgtttcatcttgtctgtgtagaagaccacacacgaaaatcctgtgattttacattttacttatcgttaatcgaatgtatatctatttaatctgcttttcttgtctaataaatatatatgtaaagtacgctttttgttgaaattttttaaacctttgtttatttttttttcttcattccgtaactcttctaccttctttatttactttctaaaatccaaatacaaaacataaaaataaataaacacagagtaaattcccaaattattccatcattaaaagatacgaggcgcgtgtaagttacaggcaagcgatccgtcctaagaaaccattattatcatgacattaacctataaaaataggcgtatcacgaggccctttcgtctcgcgcgtttcggtgatgacggtgaaaacctctgacacatgcagctcccggagacggtcacagcttgtctgtaagcggatgccgggagcagacaagcccgtcagggcgcgtcagcgggtgttggcgggtgtcggggctggcttaactatgcggcatcagagcagattgtactgagagtgcaccataccacagccggaagaggagtagggaatattactggctgaaaataagtcttgaatgaacgtatacgcgtatatttctaccaatctctcaacactgagtaatggtagttataagaaagagaccgagttagggacagttagaggcggtggagatattccttatggcatgtctggcgatgataaaacttttcaaacggcagccccgatctaaaagagctgacagggaaatggtcagaaaaagaaacgtgcacccgcccgtctggacgcgccgctcacccgcacggcagagaccaatcagtaaaaatcaacggttaacgacattactatatatataatataggaagcatttaatagaacagcatcgtaatatatgtgtactttgcagttatgacgccagatggcagtagtggaagatattctttattgaaaaatagcttgtcaccttacgtacaatcttgatccggagcttttctttttttgccgattaagaattcggtcgaaaaaagaaaaggagagggccaagagggagggcattggtgactattgagcacgtgagtatacgtgattaagcacacaaaggcagcttggagtatgtctgttattaatttcacaggtagttctggtccattggtgaaagtttgcggcttgcagagcacagaggccgcagaatgtgctctagattccgatgctgacttgctgggtattatatgtgtgcccaatagaaagagaacaattgacccggttattgcaaggaaaatttcaagtcttgtaaaagcatataaaaatagttcaggcactccgaaatacttggttggcgtgtttcgtaatcaacctaaggaggatgttttggctctggtcaatgattacggcattgatatcgtccaactgcatggagatgagtcgtggcaagaataccaagagttcctcggtttgccagttattaaaagactcgtatttccaaaagactgcaacatactactcagtgcagcttcacagaaacctcattcgtttattcccttgtttgattcagaagcaggtgggacaggtgaacttttggattggaactcgatttctgactgggttggaaggcaagagagccccgaaagcttacattttatgttagctggtggactgacgccagaaaatgttggtgatgcgcttagattaaatggcgttattggtgttgatgtaagcggaggtgtggagacaaatggtgtaaaagactctaacaaaatagcaaatttcgtcaaaaatgctaagaaataggttattactgagtagtatttatttaagtattgtttgtgcacttgcctgcaggccttttgaaaagcaagcataaaagatctaaacataaaatctgtaaaataacaagatgtaaagataatgctaaatcatttggctttttgattgattgtacaggactgggtggaatcccttctgcagcacctggattaccctgttatccctagttttgggttaaagatggttaaatgattcgaaaataataaagggaaaatcagtttttgatatcaaaattatacatgtcaacgataatacaaaatataatacaaactataagatgttatcagtatttattatgcatttagaataaattttgtgtcgcccttaattgtgagcggataacaattacgagcttcatgcacagtgaaatcatgaaaaatttatttgctttgtgagcggataacaattataatatgtggaattgtgagcgctcacaattccacaacggtttccctctagaaataattttgtttaacttttcgagaccttaggaggtaaacatatgacggcattgacggaaggtgcaaaactgtttgagaaagagatcccgtatatcaccgaactggaaggcgacgtcgaaggtatgaaatttatcattaaaggcgagggtaccggtgacgcgaccacgggtaccattaaagcgaaatacatctgcactacgggcgacctgccggtcccgtgggcaaccctggtgagcaccctgagctacggtgttcagtgtttcgccaagtacccgagccacatcaaggatttctttaagagcgccatgccggaaggttatacccaagagcgtaccatcagcttcgaaggcgacggcgtgtacaagacgcgtgctatggttacctacgaacgcggttctatctacaatcgtgtcacgctgactggtgagaactttaagaaagacggtcacattctgcgtaagaacgttgcattccaatgcccgccaagcattctgtatattctgcctgacaccgttaacaatggcatccgcgttgagttcaaccaggcgtacgatattgaaggtgtgaccgaaaaactggttaccaaatgcagccaaatgaatcgtccgttggcgggctccgcggcagtgcatatcccgcgttatcatcacattacctaccacaccaaactgagcaaagaccgcgacgagcgccgtgatcacatgtgtctggtagaggtcgtgaaagcggttgatctggacacgtatcagtaatgagaattctgtacactcgagggtctcaccccaagggcgacaccccctaattagcccgggcgaaaggcccagtctttcgactgagcctttcgttttatttgatgcctggcagttccctactctcgcatggggagtccccacactaccatcggcgctacggcgtttcacttctgagttcggcatgtcgaagatagggactcttaacatcccaaaactacctagctgcattttcaggaggaagcgatgggcggccgcacaccttctatgcggtgtgaaataccgccatgaccaaaatcccttaacgtgagttttcgttccactgagcgtcagaccccgtagaaaagatcaaaggatcttc

SEQ ID NO: 103 - DNA, 6351 bp, Artificial Sequence
  Synthetically constructed plasmid pJDI429
ttgagatcctttttttctgcgcgtaatctgctgcttgcaaacaaaaaaaccaccgctaccagcggtggtttgtttgccggatcaagagctaccaactctttttccgaaggtaactggcttcagcagagcgcagataccaaatactgttcttctagtgtagccgtagttaggccaccacttcaagaactctgtagcaccgcctacatacctcgctctgctaatcctgttaccagtggctgctgccagtggcgataagtcgtgtcttaccgggttggactcaagacgatagttaccggataaggcgcagcggtcgggctgaacggggggttcgtgcacacagcccagcttggagcgaacgacctacaccgaactgagatacctacagcgtgagctatgagaaagcgccacgcttcccgaagggagaaaggcggacaggtatccggtaagcggcagggtcggaacaggagagcgcacgagggagcttccagggggaaacgcctggtatctttatagtcctgtcgggtttcgccacctctgacttgagcgtcgatttttgtgatgctcgtcaggggggcggagcctatggaaaaacgccagcaacgcggcctttttacggttcctggccttttgctggccttttgctcacatgttctttcctgcgttatcccctgattctgtggataaccgtattaccgcctttgagtgagctgataccgctcgccgcagccgaacgaccgagcgcagcgagtcagtgagcgaggaagcggaagagcgcccaatacgcaaaccgcctctccccgcgcgttggccgattcattaatgcagctggcacgacaggtttcccgactggaaagcgggcagtgagcgcaacgcaattaatgtgagttagctcactcattaggcaccccaggctttacactgataatgggtgagtgagtgtgtgcgtgtggggcgcgccagatgggaacagctagcttcacgctgccgcaagcactcagggcgcaagggctgctaaaggaagcggaacacgtagaaagccagtccgcagaaacggtgctgaccccggatgaatgtcagctactgggctatctggacaagggaaaacgcaagcgcaaagagaaagcaggtagcttgcagtgggcttacatggcgatagctagactgggcggttttatggacagcaagcgaaccggaattgccagctggggcgccctctggtaaggttgggaagccctgcaaagtaaactggatggctttcttgccgccaaggatctgatggcgcaggggatcaagatctgatcaagagacaggatgaggatcgtttcgcatgattgaacaagatggattgcacgcaggttctccggccgcttgggtggagaggctattcggctatgactgggcacaacagacaatcggctgctctgatgccgccgtgttccggctgtcagcgcaggggcgcccggttctttttgtcaagaccgacctgtccggtgccctgaatgaactccaagacgaggcagcgcggctatcgtggctggccacgacgggcgttccttgcgcagctgtgctcgacgttgtcactgaagcgggaagggactggctgctattgggcgaagtgccggggcaggatctcctgtcatctcaccttgctcctgccgagaaagtatccatcatggctgatgcaatgcggcggctgcatacgcttgatccggctacctgcccattcgaccaccaagcgaaacatcgcatcgagcgagcacgtactcggatggaagccggtcttgtcgatcaggatgatctggacgaagagcatcaggggctcgcgccagccgaactgttcgccaggctcaaggcgcggatgcccgacggcgaggatctcgtcgtgacccatggcgatgcctgcttgccgaatatcatggtggaaaatggccgcttttctggattcatcgactgtggccggctgggtgtggcggaccgctatcaggacatagcgttggctacccgtgatattgctgaagagcttggcggcgaatgggctgaccgcttcctcgtgctttacggtatcgccgctcccgattcgcagcgcatcgccttctatcgccttcttgacgagttcttctgagcgggactctggggttcgctagaggatcgatcctttttaacccatcacatatacctgccgttcactattatttagtgaaatgagatattatgatattttctgaattgtgattaaaaaggcaactttatgcccatgcaacagaaactataaaaaatacagagaatgaaaagaaacagatagattttttagttctttaggcccgtagtctgcaaatccttttatgattttctatcaaacaaaagaggaaaatagaccagttgcaatccaaacgagagtctaatagaatgaggtcgaaaagtaaatcgcgcgggtttgttactgataaagcaggcaagacctaaaatgtgtaaagggcaaagtgtatactttggcgtcaccccttacatattttaggtctttttttattgtgcgtaactaacttgccatcttcaaacaggagggctggaagaagcagaccgctaacacagtacataaaaaaggagacatgaacgactccagtctttctagaagatggcaaacagctattatgggtattatgggtccccgaagcagggttatgcagcggaaaagctccccgaaaagtgccacctgggtccttttcatcacgtgctataaaaataattataatttaaattttttaatataaatatataaattaaaaatagaaagtaaaaaaagaaattaaagaaaaaatagtttttgttttccgaagatgtaaaagactctagggggatcgccaacaaatactaccttttatcttgctcttcctgctctcaggtattaatgccgaattgtttcatcttgtctgtgtagaagaccacacacgaaaatcctgtgattttacattttacttatcgttaatcgaatgtatatctatttaatctgcttttcttgtctaataaatatatatgtaaagtacgctttttgttgaaattttttaaacctttgtttatttttttttcttcattccgtaactcttctaccttctttatttactttctaaaatccaaatacaaaacataaaaataaataaacacagagtaaattcccaaattattccatcattaaaagatacgaggcgcgtgtaagttacaggcaagcgatccgtcctaagaaaccattattatcatgacattaacctataaaaataggcgtatcacgaggccctttcgtctcgcgcgtttcggtgatgacggtgaaaacctctgacacatgcagctcccggagacggtcacagcttgtctgtaagcggatgccgggagcagacaagcccgtcagggcgcgtcagcgggtgttggcgggtgtcggggctggcttaactatgcggcatcagagcagattgtactgagagtgcaccataccacagccggaagaggagtagggaatattactggctgaaaataagtcttgaatgaacgtatacgcgtatatttctaccaatctctcaacactgagtaatggtagttataagaaagagaccgagttagggacagttagaggcggtggagatattccttatggcatgtctggcgatgataaaacttttcaaacggcagccccgatctaaaagagctgacagggaaatggtcagaaaaagaaacgtgcacccgcccgtctggacgcgccgctcacccgcacggcagagaccaatcagtaaaaatcaacggttaacgacattactatatatataatataggaagcatttaatagaacagcatcgtaatatatgtgtactttgcagttatgacgccagatggcagtagtggaagatattctttattgaaaaatagcttgtcaccttacgtacaatcttgatccggagcttttctttttttgccgattaagaattcggtcgaaaaaagaaaaggagagggccaagagggagggcattggtgactattgagcacgtgagtatacgtgattaagcacacaaaggcagcttggagtatgtctgttattaatttcacaggtagttctggtccattggtgaaagtttgcggcttgcagagcacagaggccgcagaatgtgctctagattccgatgctgacttgctgggtattatatgtgtgcccaatagaaagagaacaattgacccggttattgcaaggaaaatttcaagtcttgtaaaagcatataaaaatagttcaggcactccgaaatacttggttggcgtgtttcgtaatcaacctaaggaggatgttttggctctggtcaatgattacggcattgatatcgtccaactgcatggagatgagtcgtggcaagaataccaagagttcctcggtttgccagttattaaaagactcgtatttccaaaagactgcaacatactactcagtgcagcttcacagaaacctcattcgtttattcccttgtttgattcagaagcaggtgggacaggtgaacttttggattggaactcgatttctgactgggttggaaggcaagagagccccgaaagcttacattttatgttagctggtggactgacgccagaaaatgttggtgatgcgcttagattaaatggcgttattggtgttgatgtaagcggaggtgtggagacaaatggtgtaaaagactctaacaaaatagcaaatttcgtcaaaaatgctaagaaataggttattactgagtagtatttatttaagtattgtttgtgcacttgcctgcaggccttttgaaaagcaagcataaaagatctaaacataaaatctgtaaaataacaagatgtaaagataatgctaaatcatttggctttttgattgattgtacaggactgggtggaatcccttctgcagcacctggattaccctgttatccctagttttgggatgttaagagtccctatcttcgaaaataataaagggaaaatcagtttttgatatcaaaattatacatgtcaacgataatacaaaatataatacaaactataagatgttatcagtatttattatgcatttagaataaattttgtgtcgcccttaattgtgagcggataacaattacgagcttcatgcacagtgaaatcatgaaaaatttatttgctttgtgagcggataacaattataatatgtggaattgtgagcgctcacaattccacaacggtttccctctagaaataattttgtttaacttttcgagaccttaggaggtaaacatatgacggcattgacggaaggtgcaaaactgtttgagaaagagatcccgtatatcaccgaactggaaggcgacgtcgaaggtatgaaatttatcattaaaggcgagggtaccggtgacgcgaccacgggtaccattaaagcgaaatacatctgcactacgggcgacctgccggtcccgtgggcaaccctggtgagcaccctgagctacggtgttcagtgtttcgccaagtacccgagccacatcaaggatttctttaagagcgccatgccggaaggttatacccaagagcgtaccatcagcttcgaaggcgacggcgtgtacaagacgcgtgctatggttacctacgaacgcggttctatctacaatcgtgtcacgctgactggtgagaactttaagaaagacggtcacattctgcgtaagaacgttgcattccaatgcccgccaagcattctgtatattctgcctgacaccgttaacaatggcatccgcgttgagttcaaccaggcgtacgatattgaaggtgtgaccgaaaaactggttaccaaatgcagccaaatgaatcgtccgttggcgggctccgcggcagtgcatatcccgcgttatcatcacattacctaccacaccaaactgagcaaagaccgcgacgagcgccgtgatcacatgtgtctggtagaggtcgtgaaagcggttgatctggacacgtatcagtaatgagaattctgtacactcgagggtctcaccccaagggcgacaccccctaattagcccgggcgaaaggcccagtctttcgactgagcctttcgttttatttgatgcctggcagttccctactctcgcatggggagtccccacactaccatcggcgctacggcgtttcacttctgagttcggcatgtcgattggggtatggggggggcggtcaaaactacctagctgcattttcaggaggaagcgatgggcggccgcacaccttctatgcggtgtgaaataccgccatgaccaaaatcccttaacgtgagttttcgttccactgagcgtcagaccccgtagaaaagatcaaaggatcttc

SEQ ID NO: 104 - DNA, 6353 bp, Artificial Sequence
  Synthetically constructed plasmid pJDI430
ttgagatcctttttttctgcgcgtaatctgctgcttgcaaacaaaaaaaccaccgctaccagcggtggtttgtttgccggatcaagagctaccaactctttttccgaaggtaactggcttcagcagagcgcagataccaaatactgttcttctagtgtagccgtagttaggccaccacttcaagaactctgtagcaccgcctacatacctcgctctgctaatcctgttaccagtggctgctgccagtggcgataagtcgtgtcttaccgggttggactcaagacgatagttaccggataaggcgcagcggtcgggctgaacggggggttcgtgcacacagcccagcttggagcgaacgacctacaccgaactgagatacctacagcgtgagctatgagaaagcgccacgcttcccgaagggagaaaggcggacaggtatccggtaagcggcagggtcggaacaggagagcgcacgagggagcttccagggggaaacgcctggtatctttatagtcctgtcgggtttcgccacctctgacttgagcgtcgatttttgtgatgctcgtcaggggggcggagcctatggaaaaacgccagcaacgcggcctttttacggttcctggccttttgctggccttttgctcacatgttctttcctgcgttatcccctgattctgtggataaccgtattaccgcctttgagtgagctgataccgctcgccgcagccgaacgaccgagcgcagcgagtcagtgagcgaggaagcggaagagcgcccaatacgcaaaccgcctctccccgcgcgttggccgattcattaatgcagctggcacgacaggtttcccgactggaaagcgggcagtgagcgcaacgcaattaatgtgagttagctcactcattaggcaccccaggctttacactgataatgggtgagtgagtgtgtgcgtgtggggcgcgccagatgggaacagctagcttcacgctgccgcaagcactcagggcgcaagggctgctaaaggaagcggaacacgtagaaagccagtccgcagaaacggtgctgaccccggatgaatgtcagctactgggctatctggacaagggaaaacgcaagcgcaaagagaaagcaggtagcttgcagtgggcttacatggcgatagctagactgggcggttttatggacagcaagcgaaccggaattgccagctggggcgccctctggtaaggttgggaagccctgcaaagtaaactggatggctttcttgccgccaaggatctgatggcgcaggggatcaagatctgatcaagagacaggatgaggatcgtttcgcatgattgaacaagatggattgcacgcaggttctccggccgcttgggtggagaggctattcggctatgactgggcacaacagacaatcggctgctctgatgccgccgtgttccggctgtcagcgcaggggcgcccggttctttttgtcaagaccgacctgtccggtgccctgaatgaactccaagacgaggcagcgcggctatcgtggctggccacgacgggcgttccttgcgcagctgtgctcgacgttgtcactgaagcgggaagggactggctgctattgggcgaagtgccggggcaggatctcctgtcatctcaccttgctcctgccgagaaagtatccatcatggctgatgcaatgcggcggctgcatacgcttgatccggctacctgcccattcgaccaccaagcgaaacatcgcatcgagcgagcacgtactcggatggaagccggtcttgtcgatcaggatgatctggacgaagagcatcaggggctcgcgccagccgaactgttcgccaggctcaaggcgcggatgcccgacggcgaggatctcgtcgtgacccatggcgatgcctgcttgccgaatatcatggtggaaaatggccgcttttctggattcatcgactgtggccggctgggtgtggcggaccgctatcaggacatagcgttggctacccgtgatattgctgaagagcttggcggcgaatgggctgaccgcttcctcgtgctttacggtatcgccgctcccgattcgcagcgcatcgccttctatcgccttcttgacgagttcttctgagcgggactctggggttcgctagaggatcgatcctttttaacccatcacatatacctgccgttcactattatttagtgaaatgagatattatgatattttctgaattgtgattaaaaaggcaactttatgcccatgcaacagaaactataaaaaatacagagaatgaaaagaaacagatagattttttagttctttaggcccgtagtctgcaaatccttttatgattttctatcaaacaaaagaggaaaatagaccagttgcaatccaaacgagagtctaatagaatgaggtcgaaaagtaaatcgcgcgggtttgttactgataaagcaggcaagacctaaaatgtgtaaagggcaaagtgtatactttggcgtcaccccttacatattttaggtctttttttattgtgcgtaactaacttgccatcttcaaacaggagggctggaagaagcagaccgctaacacagtacataaaaaaggagacatgaacgactccagtctttctagaagatggcaaacagctattatgggtattatgggtccccgaagcagggttatgcagcggaaaagctccccgaaaagtgccacctgggtccttttcatcacgtgctataaaaataattataatttaaattttttaatataaatatataaattaaaaatagaaagtaaaaaaagaaattaaagaaaaaatagtttttgttttccgaagatgtaaaagactctagggggatcgccaacaaatactaccttttatcttgctcttcctgctctcaggtattaatgccgaattgtttcatcttgtctgtgtagaagaccacacacgaaaatcctgtgattttacattttacttatcgttaatcgaatgtatatctatttaatctgcttttcttgtctaataaatatatatgtaaagtacgctttttgttgaaattttttaaacctttgtttatttttttttcttcattccgtaactcttctaccttctttatttactttctaaaatccaaatacaaaacataaaaataaataaacacagagtaaattcccaaattattccatcattaaaagatacgaggcgcgtgtaagttacaggcaagcgatccgtcctaagaaaccattattatcatgacattaacctataaaaataggcgtatcacgaggccctttcgtctcgcgcgtttcggtgatgacggtgaaaacctctgacacatgcagctcccggagacggtcacagcttgtctgtaagcggatgccgggagcagacaagcccgtcagggcgcgtcagcgggtgttggcgggtgtcggggctggcttaactatgcggcatcagagcagattgtactgagagtgcaccataccacagccggaagaggagtagggaatattactggctgaaaataagtcttgaatgaacgtatacgcgtatatttctaccaatctctcaacactgagtaatggtagttataagaaagagaccgagttagggacagttagaggcggtggagatattccttatggcatgtctggcgatgataaaacttttcaaacggcagccccgatctaaaagagctgacagggaaatggtcagaaaaagaaacgtgcacccgcccgtctggacgcgccgctcacccgcacggcagagaccaatcagtaaaaatcaacggttaacgacattactatatatataatataggaagcatttaatagaacagcatcgtaatatatgtgtactttgcagttatgacgccagatggcagtagtggaagatattctttattgaaaaatagcttgtcaccttacgtacaatcttgatccggagcttttctttttttgccgattaagaattcggtcgaaaaaagaaaaggagagggccaagagggagggcattggtgactattgagcacgtgagtatacgtgattaagcacacaaaggcagcttggagtatgtctgttattaatttcacaggtagttctggtccattggtgaaagtttgcggcttgcagagcacagaggccgcagaatgtgctctagattccgatgctgacttgctgggtattatatgtgtgcccaatagaaagagaacaattgacccggttattgcaaggaaaatttcaagtcttgtaaaagcatataaaaatagttcaggcactccgaaatacttggttggcgtgtttcgtaatcaacctaaggaggatgttttggctctggtcaatgattacggcattgatatcgtccaactgcatggagatgagtcgtggcaagaataccaagagttcctcggtttgccagttattaaaagactcgtatttccaaaagactgcaacatactactcagtgcagcttcacagaaacctcattcgtttattcccttgtttgattcagaagcaggtgggacaggtgaacttttggattggaactcgatttctgactgggttggaaggcaagagagccccgaaagcttacattttatgttagctggtggactgacgccagaaaatgttggtgatgcgcttagattaaatggcgttattggtgttgatgtaagcggaggtgtggagacaaatggtgtaaaagactctaacaaaatagcaaatttcgtcaaaaatgctaagaaataggttattactgagtagtatttatttaagtattgtttgtgcacttgcctgcaggccttttgaaaagcaagcataaaagatctaaacataaaatctgtaaaataacaagatgtaaagataatgctaaatcatttggctttttgattgattgtacaggactgggtggaatcccttctgcagcacctggattaccctgttatccctagttttgaggagtgttcagtctccgtgaactcgaaaataataaagggaaaatcagtttttgatatcaaaattatacatgtcaacgataatacaaaatataatacaaactataagatgttatcagtatttattatgcatttagaataaattttgtgtcgcccttaattgtgagcggataacaattacgagcttcatgcacagtgaaatcatgaaaaatttatttgctttgtgagcggataacaattataatatgtggaattgtgagcgctcacaattccacaacggtttccctctagaaataattttgtttaacttttcgagaccttaggaggtaaacatatgacggcattgacggaaggtgcaaaactgtttgagaaagagatcccgtatatcaccgaactggaaggcgacgtcgaaggtatgaaatttatcattaaaggcgagggtaccggtgacgcgaccacgggtaccattaaagcgaaatacatctgcactacgggcgacctgccggtcccgtgggcaaccctggtgagcaccctgagctacggtgttcagtgtttcgccaagtacccgagccacatcaaggatttctttaagagcgccatgccggaaggttatacccaagagcgtaccatcagcttcgaaggcgacggcgtgtacaagacgcgtgctatggttacctacgaacgcggttctatctacaatcgtgtcacgctgactggtgagaactttaagaaagacggtcacattctgcgtaagaacgttgcattccaatgcccgccaagcattctgtatattctgcctgacaccgttaacaatggcatccgcgttgagttcaaccaggcgtacgatattgaaggtgtgaccgaaaaactggttaccaaatgcagccaaatgaatcgtccgttggcgggctccgcggcagtgcatatcccgcgttatcatcacattacctaccacaccaaactgagcaaagaccgcgacgagcgccgtgatcacatgtgtctggtagaggtcgtgaaagcggttgatctggacacgtatcagtaatgagaattctgtacactcgagggtctcaccccaagggcgacaccccctaattagcccgggcgaaaggcccagtctttcgactgagcctttcgttttatttgatgcctggcagttccctactctcgcatggggagtccccacactaccatcggcgctacggcgtttcacttctgagttcggcatgtcgaagatagggactcttaacatcccaaaactacctagctgcattttcaggaggaagcgatgggcggccgcacaccttctatgcggtgtgaaataccgccatgaccaaaatcccttaacgtgagttttcgttccactgagcgtcagaccccgtagaaaagatcaaaggatcttc

SEQ ID NO: 105 - DNA, 6353 bp, Artificial Sequence
  Synthetically constructed plasmid pJDI431
ttgagatcctttttttctgcgcgtaatctgctgcttgcaaacaaaaaaaccaccgctaccagcggtggtttgtttgccggatcaagagctaccaactctttttccgaaggtaactggcttcagcagagcgcagataccaaatactgttcttctagtgtagccgtagttaggccaccacttcaagaactctgtagcaccgcctacatacctcgctctgctaatcctgttaccagtggctgctgccagtggcgataagtcgtgtcttaccgggttggactcaagacgatagttaccggataaggcgcagcggtcgggctgaacggggggttcgtgcacacagcccagcttggagcgaacgacctacaccgaactgagatacctacagcgtgagctatgagaaagcgccacgcttcccgaagggagaaaggcggacaggtatccggtaagcggcagggtcggaacaggagagcgcacgagggagcttccagggggaaacgcctggtatctttatagtcctgtcgggtttcgccacctctgacttgagcgtcgatttttgtgatgctcgtcaggggggcggagcctatggaaaaacgccagcaacgcggcctttttacggttcctggccttttgctggccttttgctcacatgttctttcctgcgttatcccctgattctgtggataaccgtattaccgcctttgagtgagctgataccgctcgccgcagccgaacgaccgagcgcagcgagtcagtgagcgaggaagcggaagagcgcccaatacgcaaaccgcctctccccgcgcgttggccgattcattaatgcagctggcacgacaggtttcccgactggaaagcgggcagtgagcgcaacgcaattaatgtgagttagctcactcattaggcaccccaggctttacactgataatgggtgagtgagtgtgtgcgtgtggggcgcgccagatgggaacagctagcttcacgctgccgcaagcactcagggcgcaagggctgctaaaggaagcggaacacgtagaaagccagtccgcagaaacggtgctgaccccggatgaatgtcagctactgggctatctggacaagggaaaacgcaagcgcaaagagaaagcaggtagcttgcagtgggcttacatggcgatagctagactgggcggttttatggacagcaagcgaaccggaattgccagctggggcgccctctggtaaggttgggaagccctgcaaagtaaactggatggctttcttgccgccaaggatctgatggcgcaggggatcaagatctgatcaagagacaggatgaggatcgtttcgcatgattgaacaagatggattgcacgcaggttctccggccgcttgggtggagaggctattcggctatgactgggcacaacagacaatcggctgctctgatgccgccgtgttccggctgtcagcgcaggggcgcccggttctttttgtcaagaccgacctgtccggtgccctgaatgaactccaagacgaggcagcgcggctatcgtggctggccacgacgggcgttccttgcgcagctgtgctcgacgttgtcactgaagcgggaagggactggctgctattgggcgaagtgccggggcaggatctcctgtcatctcaccttgctcctgccgagaaagtatccatcatggctgatgcaatgcggcggctgcatacgcttgatccggctacctgcccattcgaccaccaagcgaaacatcgcatcgagcgagcacgtactcggatggaagccggtcttgtcgatcaggatgatctggacgaagagcatcaggggctcgcgccagccgaactgttcgccaggctcaaggcgcggatgcccgacggcgaggatctcgtcgtgacccatggcgatgcctgcttgccgaatatcatggtggaaaatggccgcttttctggattcatcgactgtggccggctgggtgtggcggaccgctatcaggacatagcgttggctacccgtgatattgctgaagagcttggcggcgaatgggctgaccgcttcctcgtgctttacggtatcgccgctcccgattcgcagcgcatcgccttctatcgccttcttgacgagttcttctgagcgggactctggggttcgctagaggatcgatcctttttaacccatcacatatacctgccgttcactattatttagtgaaatgagatattatgatattttctgaattgtgattaaaaaggcaactttatgcccatgcaacagaaactataaaaaatacagagaatgaaaagaaacagatagattttttagttctttaggcccgtagtctgcaaatccttttatgattttctatcaaacaaaagaggaaaatagaccagttgcaatccaaacgagagtctaatagaatgaggtcgaaaagtaaatcgcgcgggtttgttactgataaagcaggcaagacctaaaatgtgtaaagggcaaagtgtatactttggcgtcaccccttacatattttaggtctttttttattgtgcgtaactaacttgccatcttcaaacaggagggctggaagaagcagaccgctaacacagtacataaaaaaggagacatgaacgactccagtctttctagaagatggcaaacagctattatgggtattatgggtccccgaagcagggttatgcagcggaaaagctccccgaaaagtgccacctgggtccttttcatcacgtgctataaaaataattataatttaaattttttaatataaatatataaattaaaaatagaaagtaaaaaaagaaattaaagaaaaaatagtttttgttttccgaagatgtaaaagactctagggggatcgccaacaaatactaccttttatcttgctcttcctgctctcaggtattaatgccgaattgtttcatcttgtctgtgtagaagaccacacacgaaaatcctgtgattttacattttacttatcgttaatcgaatgtatatctatttaatctgcttttcttgtctaataaatatatatgtaaagtacgctttttgttgaaattttttaaacctttgtttatttttttttcttcattccgtaactcttctaccttctttatttactttctaaaatccaaatacaaaacataaaaataaataaacacagagtaaattcccaaattattccatcattaaaagatacgaggcgcgtgtaagttacaggcaagcgatccgtcctaagaaaccattattatcatgacattaacctataaaaataggcgtatcacgaggccctttcgtctcgcgcgtttcggtgatgacggtgaaaacctctgacacatgcagctcccggagacggtcacagcttgtctgtaagcggatgccgggagcagacaagcccgtcagggcgcgtcagcgggtgttggcgggtgtcggggctggcttaactatgcggcatcagagcagattgtactgagagtgcaccataccacagccggaagaggagtagggaatattactggctgaaaataagtcttgaatgaacgtatacgcgtatatttctaccaatctctcaacactgagtaatggtagttataagaaagagaccgagttagggacagttagaggcggtggagatattccttatggcatgtctggcgatgataaaacttttcaaacggcagccccgatctaaaagagctgacagggaaatggtcagaaaaagaaacgtgcacccgcccgtctggacgcgccgctcacccgcacggcagagaccaatcagtaaaaatcaacggttaacgacattactatatatataatataggaagcatttaatagaacagcatcgtaatatatgtgtactttgcagttatgacgccagatggcagtagtggaagatattctttattgaaaaatagcttgtcaccttacgtacaatcttgatccggagcttttctttttttgccgattaagaattcggtcgaaaaaagaaaaggagagggccaagagggagggcattggtgactattgagcacgtgagtatacgtgattaagcacacaaaggcagcttggagtatgtctgttattaatttcacaggtagttctggtccattggtgaaagtttgcggcttgcagagcacagaggccgcagaatgtgctctagattccgatgctgacttgctgggtattatatgtgtgcccaatagaaagagaacaattgacccggttattgcaaggaaaatttcaagtcttgtaaaagcatataaaaatagttcaggcactccgaaatacttggttggcgtgtttcgtaatcaacctaaggaggatgttttggctctggtcaatgattacggcattgatatcgtccaactgcatggagatgagtcgtggcaagaataccaagagttcctcggtttgccagttattaaaagactcgtatttccaaaagactgcaacatactactcagtgcagcttcacagaaacctcattcgtttattcccttgtttgattcagaagcaggtgggacaggtgaacttttggattggaactcgatttctgactgggttggaaggcaagagagccccgaaagcttacattttatgttagctggtggactgacgccagaaaatgttggtgatgcgcttagattaaatggcgttattggtgttgatgtaagcggaggtgtggagacaaatggtgtaaaagactctaacaaaatagcaaatttcgtcaaaaatgctaagaaataggttattactgagtagtatttatttaagtattgtttgtgcacttgcctgcaggccttttgaaaagcaagcataaaagatctaaacataaaatctgtaaaataacaagatgtaaagataatgctaaatcatttggctttttgattgattgtacaggactgggtggaatcccttctgcagcacctggattaccctgttatccctagttttgaggagtgttcagtctccgtgaactcgaaaataataaagggaaaatcagtttttgatatcaaaattatacatgtcaacgataatacaaaatataatacaaactataagatgttatcagtatttattatgcatttagaataaattttgtgtcgcccttaattgtgagcggataacaattacgagcttcatgcacagtgaaatcatgaaaaatttatttgctttgtgagcggataacaattataatatgtggaattgtgagcgctcacaattccacaacggtttccctctagaaataattttgtttaacttttcgagaccttaggaggtaaacatatgacggcattgacggaaggtgcaaaactgtttgagaaagagatcccgtatatcaccgaactggaaggcgacgtcgaaggtatgaaatttatcattaaaggcgagggtaccggtgacgcgaccacgggtaccattaaagcgaaatacatctgcactacgggcgacctgccggtcccgtgggcaaccctggtgagcaccctgagctacggtgttcagtgtttcgccaagtacccgagccacatcaaggatttctttaagagcgccatgccggaaggttatacccaagagcgtaccatcagcttcgaaggcgacggcgtgtacaagacgcgtgctatggttacctacgaacgcggttctatctacaatcgtgtcacgctgactggtgagaactttaagaaagacggtcacattctgcgtaagaacgttgcattccaatgcccgccaagcattctgtatattctgcctgacaccgttaacaatggcatccgcgttgagttcaaccaggcgtacgatattgaaggtgtgaccgaaaaactggttaccaaatgcagccaaatgaatcgtccgttggcgggctccgcggcagtgcatatcccgcgttatcatcacattacctaccacaccaaactgagcaaagaccgcgacgagcgccgtgatcacatgtgtctggtagaggtcgtgaaagcggttgatctggacacgtatcagtaatgagaattctgtacactcgagggtctcaccccaagggcgacaccccctaattagcccgggcgaaaggcccagtctttcgactgagcctttcgttttatttgatgcctggcagttccctactctcgcatggggagtccccacactaccatcggcgctacggcgtttcacttctgagttcggcatgtcgattggggtatggggggggcggtcaaaactacctagctgcattttcaggaggaagcgatgggcggccgcacaccttctatgcggtgtgaaataccgccatgaccaaaatcccttaacgtgagttttcgttccactgagcgtcagaccccgtagaaaagatcaaaggatcttc

SEQ ID NO: 106 - DNA, 4155 bp, Artificial Sequence
  Synthetically constructed plasmid pJDI432
gcccctgcagccgaattatattatttttgccaaataatttttaacaaaagctctgaagtcttcttcatttaaattcttagatgatacttcatctggaaaattgtcccaattagtagcatcacgctgtgagtaagttctaaaccatttttttattgttgtattatctctaatcttactactcgatgagttttcggtattatctctatttttaacttggagcaggttccattcattgtttttttcatcatagtgaataaaatcaactgctttaacacttgtgcctgaacaccatatccatccggcgtaatacgactcactatagggagagcggccgccagatcttccggatggctcgagtttttcagcaagattttgggttaaagatggttaaatgattcgacatacacataaagtagcttgcgtatttaaaattatgaacctaaggggtttagcacttcacgctgccgcaagcactcagggcgcaagggctgctaaaggaagcggaacacgtagaaagccagtccgcagaaacggtgctgaccccggatgaatgtcagctactgggctatctggacaagggaaaacgcaagcgcaaagagaaagcaggtagcttgcagtgggcttacatggcgatagctagactgggcggttttatggacagcaagcgaaccggaattgccagctggggcgccctctggtaaggttgggaagccctgcaaagtaaactggatggctttcttgccgccaaggatctgatggcgcaggggatcaagatctgatcaagagacaggatgaggatcgtttcgcatggagaaaaagatcacgggctacactaccgtggacatctcgcaatggcatcgcaaggaacacttcgaggcatttcaaagcgtggcacaatgtacttacaaccagaccgtccagctggatattaccgcgtttttgaagaccgttaagaaaaacaagcacaagttttatccagcctttatccatattctcgcccgcttgatgaatgcgcaccccgaatttcgtatggccatgaaagatggtgagctcgttatctgggactcagtccatccatgctataccgttttccacgaacaaactgaaactttttcttcgctgtggtccgaatatcacgatgatttccgccaatttttgcatatctacagccaagatgtcgcgtgctatggtgaaaacctggcttactttcccaagggattcatcgagaatatgttctttgtttcagcaaacccctgggtgtccttcacgtcgtttgacttgaacgtggccaatatggataatttcttcgctccagttttcaccatgggtaagtactatacccaaggagacaaggtccttatgccacttgcaatccaagtacaccacgcagtctgcgatggtttccatgtgggacgcatgcttaacgaactccaacagtactgtgatgaatggcaaggcggcgcgtagccccccaaccgaagttgaggggatttttgaatcctcggtcccccttgtccttccagtcgaagatagggactcttaacatcccaaaatctttctagaagatctcctacaatattctcagctgccatggaaaatcgatgttcttcttttattctctcaagattttcaggctgtatattaaaacttatattaagaactatgctaaccacctcatcaggaaccgttgtaggtggcgtgggttttcttggcaatcgactctcatgaaaactacgagctaaatattcaatatgttcctcttgaccaactttattctgcattttttttgaacgaggtttagagcaagcttcaggaaactgagacaggaattttattaaaaatttaaattttgaagaaagttcagggttaatagcatccattttttgctttgcaagttcctcagcattcttaacaaaagacgtctcttttgacatgtttaaagtttaaacctcctgtgtgaaattattatccgctcataattccacacattatacgagccggaagcataaagtgtaaagcctggggtgcctaatgagtgagctaactcacattaattgcgttgcgctcactgccaattgctttccagtcgggaaacctgtcgtgccagctgcattaatgaatcggccaacgcgcggggagaggcggtttgcgtattgggcgctcttccgcttcctcgctcactgactcgctgcgctcggtcgttcggctgcggcgagcggtatcagctcactcaaaggcggtaatacggttatccacagaatcaggggataacgcaggaaagaacatgtgagcaaaaggccagcaaaaggccaggaaccgtaaaaaggccgcgttgctggcgtttttccataggctccgcccccctgacgagcatcacaaaaatcgacgctcaagtcagaggtggcgaaacccgacaggactataaagataccaggcgtttccccctggaagctccctcgtgcgctctcctgttccgaccctgccgcttaccggatacctgtccgcctttctcccttcgggaagcgtggcgctttctcatagctcacgctgtaggtatctcagttcggtgtaggtcgttcgctccaagctgggctgtgtgcacgaaccccccgttcagcccgaccgctgcgccttatccggtaactatcgtcttgagtccaacccggtaagacacgacttatcgccactggcagcagccactggtaacaggattagcagagcgaggtatgtaggcggtgctacagagttcttgaagtggtggcctaactacggctacactagaaggacagtatttggtatctgcgctctgctgaagccagttaccttcggaaaaagagttggtagctcttgatccggcaaacaaaccaccgctggtagcggtggtttttttgtttgcaagcagcagattacgcgcagaaaaaaaggatctcaagaagatcctttgatcttttctacggggtctgacgctcagtggaacgaaaactcacgttaagggattttggtcatgagattatcaaaaaggatcttcacctagatccttttaaattaaaaatgaagttttaaatcaatctaaagtatatatgagtaaacttggtctgacagttaccaatgcttaatcagtgaggcacctatctcagcgatctgtctatttcgttcatccatagttgcctgactccccgtcgtgtagataactacgatacgggagggcttaccatctggccccagtgctgcaatgataccgcgagacccacgctcaccggctccagatttatcagcaataaaccagccagccggaagggccgagcgcagaagtggtcctgcaactttatccgcctccatccagtctattaattgttgccgggaagctagagtaagtagttcgccagttaatagtttgcgcaacgttgttgccattgctacaggcatcgtggtgtcacgctcgtcgtttggtatggcttcattcagctccggttcccaacgatcaaggcgagttacatgatcccccatgttgtgcaaaaaagcggttagctccttcggtcctccgatcgttgtcagaagtaagttggccgcagtgttatcactcatggttatggcagcactgcataattctcttactgtcatgccatccgtaagatgcttttctgtgactggtgagtactcaaccaagtcattctgagaatagtgtatgcggcgaccgagttgctcttgcccggcgtcaatacgggataataccgcgccacatagcagaactttaaaagtgctcatcattggaaaacgttcttcggggcgaaaactctcaaggatcttaccgctgttgagatccagttcgatgtaacccactcgtgcacccaactgatcttcagcatcttttactttcaccagcgtttctgggtgagcaaaaacaggaaggcaaaatgccgcaaaaaagggaataagggcgacacggaaatgttgaatactcatactcttcctttttcaatattattgaagcatttatcagggttattgtctcatgagcggatacatatttgaatgtatttagaaaaataaacaaataggggttccgcgcacatttccccgaaaagtgccacctgacgtctaagaaaccattattatcatgacattaacctataaaaataggcgtatcacgaggcc

SEQ ID NO: 107 - DNA, 4155 bp, Artificial Sequence
  Synthetically constructed plasmid pJDI434
gcccctgcagccgaattatattatttttgccaaataatttttaacaaaagctctgaagtcttcttcatttaaattcttagatgatacttcatctggaaaattgtcccaattagtagcatcacgctgtgagtaagttctaaaccatttttttattgttgtattatctctaatcttactactcgatgagttttcggtattatctctatttttaacttggagcaggttccattcattgtttttttcatcatagtgaataaaatcaactgctttaacacttgtgcctgaacaccatatccatccggcgtaatacgactcactatagggagagcggccgccagatcttccggatggctcgagtttttcagcaagattttgggatgttaagagtccctatcttcgacatacacataaagtagcttgcgtatttaaaattatgaacctaaggggtttagcacttcacgctgccgcaagcactcagggcgcaagggctgctaaaggaagcggaacacgtagaaagccagtccgcagaaacggtgctgaccccggatgaatgtcagctactgggctatctggacaagggaaaacgcaagcgcaaagagaaagcaggtagcttgcagtgggcttacatggcgatagctagactgggcggttttatggacagcaagcgaaccggaattgccagctggggcgccctctggtaaggttgggaagccctgcaaagtaaactggatggctttcttgccgccaaggatctgatggcgcaggggatcaagatctgatcaagagacaggatgaggatcgtttcgcatggagaaaaagatcacgggctacactaccgtggacatctcgcaatggcatcgcaaggaacacttcgaggcatttcaaagcgtggcacaatgtacttacaaccagaccgtccagctggatattaccgcgtttttgaagaccgttaagaaaaacaagcacaagttttatccagcctttatccatattctcgcccgcttgatgaatgcgcaccccgaatttcgtatggccatgaaagatggtgagctcgttatctgggactcagtccatccatgctataccgttttccacgaacaaactgaaactttttcttcgctgtggtccgaatatcacgatgatttccgccaatttttgcatatctacagccaagatgtcgcgtgctatggtgaaaacctggcttactttcccaagggattcatcgagaatatgttctttgtttcagcaaacccctgggtgtccttcacgtcgtttgacttgaacgtggccaatatggataatttcttcgctccagttttcaccatgggtaagtactatacccaaggagacaaggtccttatgccacttgcaatccaagtacaccacgcagtctgcgatggtttccatgtgggacgcatgcttaacgaactccaacagtactgtgatgaatggcaaggcggcgcgtagccccccaaccgaagttgaggggatttttgaatcctcggtcccccttgtccttccagtcgattggggtatggggggggcggtcaaaatctttctagaagatctcctacaatattctcagctgccatggaaaatcgatgttcttcttttattctctcaagattttcaggctgtatattaaaacttatattaagaactatgctaaccacctcatcaggaaccgttgtaggtggcgtgggttttcttggcaatcgactctcatgaaaactacgagctaaatattcaatatgttcctcttgaccaactttattctgcattttttttgaacgaggtttagagcaagcttcaggaaactgagacaggaattttattaaaaatttaaattttgaagaaagttcagggttaatagcatccattttttgctttgcaagttcctcagcattcttaacaaaagacgtctcttttgacatgtttaaagtttaaacctcctgtgtgaaattattatccgctcataattccacacattatacgagccggaagcataaagtgtaaagcctggggtgcctaatgagtgagctaactcacattaattgcgttgcgctcactgccaattgctttccagtcgggaaacctgtcgtgccagctgcattaatgaatcggccaacgcgcggggagaggcggtttgcgtattgggcgctcttccgcttcctcgctcactgactcgctgcgctcggtcgttcggctgcggcgagcggtatcagctcactcaaaggcggtaatacggttatccacagaatcaggggataacgcaggaaagaacatgtgagcaaaaggccagcaaaaggccaggaaccgtaaaaaggccgcgttgctggcgtttttccataggctccgcccccctgacgagcatcacaaaaatcgacgctcaagtcagaggtggcgaaacccgacaggactataaagataccaggcgtttccccctggaagctccctcgtgcgctctcctgttccgaccctgccgcttaccggatacctgtccgcctttctcccttcgggaagcgtggcgctttctcatagctcacgctgtaggtatctcagttcggtgtaggtcgttcgctccaagctgggctgtgtgcacgaaccccccgttcagcccgaccgctgcgccttatccggtaactatcgtcttgagtccaacccggtaagacacgacttatcgccactggcagcagccactggtaacaggattagcagagcgaggtatgtaggcggtgctacagagttcttgaagtggtggcctaactacggctacactagaaggacagtatttggtatctgcgctctgctgaagccagttaccttcggaaaaagagttggtagctcttgatccggcaaacaaaccaccgctggtagcggtggtttttttgtttgcaagcagcagattacgcgcagaaaaaaaggatctcaagaagatcctttgatcttttctacggggtctgacgctcagtggaacgaaaactcacgttaagggattttggtcatgagattatcaaaaaggatcttcacctagatccttttaaattaaaaatgaagttttaaatcaatctaaagtatatatgagtaaacttggtctgacagttaccaatgcttaatcagtgaggcacctatctcagcgatctgtctatttcgttcatccatagttgcctgactccccgtcgtgtagataactacgatacgggagggcttaccatctggccccagtgctgcaatgataccgcgagacccacgctcaccggctccagatttatcagcaataaaccagccagccggaagggccgagcgcagaagtggtcctgcaactttatccgcctccatccagtctattaattgttgccgggaagctagagtaagtagttcgccagttaatagtttgcgcaacgttgttgccattgctacaggcatcgtggtgtcacgctcgtcgtttggtatggcttcattcagctccggttcccaacgatcaaggcgagttacatgatcccccatgttgtgcaaaaaagcggttagctccttcggtcctccgatcgttgtcagaagtaagttggccgcagtgttatcactcatggttatggcagcactgcataattctcttactgtcatgccatccgtaagatgcttttctgtgactggtgagtactcaaccaagtcattctgagaatagtgtatgcggcgaccgagttgctcttgcccggcgtcaatacgggataataccgcgccacatagcagaactttaaaagtgctcatcattggaaaacgttcttcggggcgaaaactctcaaggatcttaccgctgttgagatccagttcgatgtaacccactcgtgcacccaactgatcttcagcatcttttactttcaccagcgtttctgggtgagcaaaaacaggaaggcaaaatgccgcaaaaaagggaataagggcgacacggaaatgttgaatactcatactcttcctttttcaatattattgaagcatttatcagggttattgtctcatgagcggatacatatttgaatgtatttagaaaaataaacaaataggggttccgcgcacatttccccgaaaagtgccacctgacgtctaagaaaccattattatcatgacattaacctataaaaataggcgtatcacgaggcc

SEQ ID NO: 108 - DNA, 4157 bp, Artificial Sequence
  Synthetically constructed plasmid pJDI435
gcccctgcagccgaattatattatttttgccaaataatttttaacaaaagctctgaagtcttcttcatttaaattcttagatgatacttcatctggaaaattgtcccaattagtagcatcacgctgtgagtaagttctaaaccatttttttattgttgtattatctctaatcttactactcgatgagttttcggtattatctctatttttaacttggagcaggttccattcattgtttttttcatcatagtgaataaaatcaactgctttaacacttgtgcctgaacaccatatccatccggcgtaatacgactcactatagggagagcggccgccagatcttccggatggctcgagtttttcagcaagattttgaggagtgttcagtctccgtgaactcgacatacacataaagtagcttgcgtatttaaaattatgaacctaaggggtttagcacttcacgctgccgcaagcactcagggcgcaagggctgctaaaggaagcggaacacgtagaaagccagtccgcagaaacggtgctgaccccggatgaatgtcagctactgggctatctggacaagggaaaacgcaagcgcaaagagaaagcaggtagcttgcagtgggcttacatggcgatagctagactgggcggttttatggacagcaagcgaaccggaattgccagctggggcgccctctggtaaggttgggaagccctgcaaagtaaactggatggctttcttgccgccaaggatctgatggcgcaggggatcaagatctgatcaagagacaggatgaggatcgtttcgcatggagaaaaagatcacgggctacactaccgtggacatctcgcaatggcatcgcaaggaacacttcgaggcatttcaaagcgtggcacaatgtacttacaaccagaccgtccagctggatattaccgcgtttttgaagaccgttaagaaaaacaagcacaagttttatccagcctttatccatattctcgcccgcttgatgaatgcgcaccccgaatttcgtatggccatgaaagatggtgagctcgttatctgggactcagtccatccatgctataccgttttccacgaacaaactgaaactttttcttcgctgtggtccgaatatcacgatgatttccgccaatttttgcatatctacagccaagatgtcgcgtgctatggtgaaaacctggcttactttcccaagggattcatcgagaatatgttctttgtttcagcaaacccctgggtgtccttcacgtcgtttgacttgaacgtggccaatatggataatttcttcgctccagttttcaccatgggtaagtactatacccaaggagacaaggtccttatgccacttgcaatccaagtacaccacgcagtctgcgatggtttccatgtgggacgcatgcttaacgaactccaacagtactgtgatgaatggcaaggcggcgcgtagccccccaaccgaagttgaggggatttttgaatcctcggtcccccttgtccttccagtcgaagatagggactcttaacatcccaaaatctttctagaagatctcctacaatattctcagctgccatggaaaatcgatgttcttcttttattctctcaagattttcaggctgtatattaaaacttatattaagaactatgctaaccacctcatcaggaaccgttgtaggtggcgtgggttttcttggcaatcgactctcatgaaaactacgagctaaatattcaatatgttcctcttgaccaactttattctgcattttttttgaacgaggtttagagcaagcttcaggaaactgagacaggaattttattaaaaatttaaattttgaagaaagttcagggttaatagcatccattttttgctttgcaagttcctcagcattcttaacaaaagacgtctcttttgacatgtttaaagtttaaacctcctgtgtgaaattattatccgctcataattccacacattatacgagccggaagcataaagtgtaaagcctggggtgcctaatgagtgagctaactcacattaattgcgttgcgctcactgccaattgctttccagtcgggaaacctgtcgtgccagctgcattaatgaatcggccaacgcgcggggagaggcggtttgcgtattgggcgctcttccgcttcctcgctcactgactcgctgcgctcggtcgttcggctgcggcgagcggtatcagctcactcaaaggcggtaatacggttatccacagaatcaggggataacgcaggaaagaacatgtgagcaaaaggccagcaaaaggccaggaaccgtaaaaaggccgcgttgctggcgtttttccataggctccgcccccctgacgagcatcacaaaaatcgacgctcaagtcagaggtggcgaaacccgacaggactataaagataccaggcgtttccccctggaagctccctcgtgcgctctcctgttccgaccctgccgcttaccggatacctgtccgcctttctcccttcgggaagcgtggcgctttctcatagctcacgctgtaggtatctcagttcggtgtaggtcgttcgctccaagctgggctgtgtgcacgaaccccccgttcagcccgaccgctgcgccttatccggtaactatcgtcttgagtccaacccggtaagacacgacttatcgccactggcagcagccactggtaacaggattagcagagcgaggtatgtaggcggtgctacagagttcttgaagtggtggcctaactacggctacactagaaggacagtatttggtatctgcgctctgctgaagccagttaccttcggaaaaagagttggtagctcttgatccggcaaacaaaccaccgctggtagcggtggtttttttgtttgcaagcagcagattacgcgcagaaaaaaaggatctcaagaagatcctttgatcttttctacggggtctgacgctcagtggaacgaaaactcacgttaagggattttggtcatgagattatcaaaaaggatcttcacctagatccttttaaattaaaaatgaagttttaaatcaatctaaagtatatatgagtaaacttggtctgacagttaccaatgcttaatcagtgaggcacctatctcagcgatctgtctatttcgttcatccatagttgcctgactccccgtcgtgtagataactacgatacgggagggcttaccatctggccccagtgctgcaatgataccgcgagacccacgctcaccggctccagatttatcagcaataaaccagccagccggaagggccgagcgcagaagtggtcctgcaactttatccgcctccatccagtctattaattgttgccgggaagctagagtaagtagttcgccagttaatagtttgcgcaacgttgttgccattgctacaggcatcgtggtgtcacgctcgtcgtttggtatggcttcattcagctccggttcccaacgatcaaggcgagttacatgatcccccatgttgtgcaaaaaagcggttagctccttcggtcctccgatcgttgtcagaagtaagttggccgcagtgttatcactcatggttatggcagcactgcataattctcttactgtcatgccatccgtaagatgcttttctgtgactggtgagtactcaaccaagtcattctgagaatagtgtatgcggcgaccgagttgctcttgcccggcgtcaatacgggataataccgcgccacatagcagaactttaaaagtgctcatcattggaaaacgttcttcggggcgaaaactctcaaggatcttaccgctgttgagatccagttcgatgtaacccactcgtgcacccaactgatcttcagcatcttttactttcaccagcgtttctgggtgagcaaaaacaggaaggcaaaatgccgcaaaaaagggaataagggcgacacggaaatgttgaatactcatactcttcctttttcaatattattgaagcatttatcagggttattgtctcatgagcggatacatatttgaatgtatttagaaaaataaacaaataggggttccgcgcacatttccccgaaaagtgccacctgacgtctaagaaaccattattatcatgacattaacctataaaaataggcgtatcacgaggcc

SEQ ID NO: 109 - DNA, 4159 bp, Artificial Sequence
  Synthetically constructed plasmid pJDI436
gcccctgcagccgaattatattatttttgccaaataatttttaacaaaagctctgaagtcttcttcatttaaattcttagatgatacttcatctggaaaattgtcccaattagtagcatcacgctgtgagtaagttctaaaccatttttttattgttgtattatctctaatcttactactcgatgagttttcggtattatctctatttttaacttggagcaggttccattcattgtttttttcatcatagtgaataaaatcaactgctttaacacttgtgcctgaacaccatatccatccggcgtaatacgactcactatagggagagcggccgccagatcttccggatggctcgagtttttcagcaagattttgaggagtgttcagtctccgtgaactcgacatacacataaagtagcttgcgtatttaaaattatgaacctaaggggtttagcacttcacgctgccgcaagcactcagggcgcaagggctgctaaaggaagcggaacacgtagaaagccagtccgcagaaacggtgctgaccccggatgaatgtcagctactgggctatctggacaagggaaaacgcaagcgcaaagagaaagcaggtagcttgcagtgggcttacatggcgatagctagactgggcggttttatggacagcaagcgaaccggaattgccagctggggcgccctctggtaaggttgggaagccctgcaaagtaaactggatggctttcttgccgccaaggatctgatggcgcaggggatcaagatctgatcaagagacaggatgaggatcgtttcgcatggagaaaaagatcacgggctacactaccgtggacatctcgcaatggcatcgcaaggaacacttcgaggcatttcaaagcgtggcacaatgtacttacaaccagaccgtccagctggatattaccgcgtttttgaagaccgttaagaaaaacaagcacaagttttatccagcctttatccatattctcgcccgcttgatgaatgcgcaccccgaatttcgtatggccatgaaagatggtgagctcgttatctgggactcagtccatccatgctataccgttttccacgaacaaactgaaactttttcttcgctgtggtccgaatatcacgatgatttccgccaatttttgcatatctacagccaagatgtcgcgtgctatggtgaaaacctggcttactttcccaagggattcatcgagaatatgttctttgtttcagcaaacccctgggtgtccttcacgtcgtttgacttgaacgtggccaatatggataatttcttcgctccagttttcaccatgggtaagtactatacccaaggagacaaggtccttatgccacttgcaatccaagtacaccacgcagtctgcgatggtttccatgtgggacgcatgcttaacgaactccaacagtactgtgatgaatggcaaggcggcgcgtagccccccaaccgaagttgaggggatttttgaatcctcggtcccccttgtccttccagtcgattggggtatggggggggcggtcaaaaaatctttctagaagatctcctacaatattctcagctgccatggaaaatcgatgttcttcttttattctctcaagattttcaggctgtatattaaaacttatattaagaactatgctaaccacctcatcaggaaccgttgtaggtggcgtgggttttcttggcaatcgactctcatgaaaactacgagctaaatattcaatatgttcctcttgaccaactttattctgcattttttttgaacgaggtttagagcaagcttcaggaaactgagacaggaattttattaaaaatttaaattttgaagaaagttcagggttaatagcatccattttttgctttgcaagttcctcagcattcttaacaaaagacgtctcttttgacatgtttaaagtttaaacctcctgtgtgaaattattatccgctcataattccacacattatacgagccggaagcataaagtgtaaagcctggggtgcctaatgagtgagctaactcacattaattgcgttgcgctcactgccaattgctttccagtcgggaaacctgtcgtgccagctgcattaatgaatcggccaacgcgcggggagaggcggtttgcgtattgggcgctcttccgcttcctcgctcactgactcgctgcgctcggtcgttcggctgcggcgagcggtatcagctcactcaaaggcggtaatacggttatccacagaatcaggggataacgcaggaaagaacatgtgagcaaaaggccagcaaaaggccaggaaccgtaaaaaggccgcgttgctggcgtttttccataggctccgcccccctgacgagcatcacaaaaatcgacgctcaagtcagaggtggcgaaacccgacaggactataaagataccaggcgtttccccctggaagctccctcgtgcgctctcctgttccgaccctgccgcttaccggatacctgtccgcctttctcccttcgggaagcgtggcgctttctcatagctcacgctgtaggtatctcagttcggtgtaggtcgttcgctccaagctgggctgtgtgcacgaaccccccgttcagcccgaccgctgcgccttatccggtaactatcgtcttgagtccaacccggtaagacacgacttatcgccactggcagcagccactggtaacaggattagcagagcgaggtatgtaggcggtgctacagagttcttgaagtggtggcctaactacggctacactagaaggacagtatttggtatctgcgctctgctgaagccagttaccttcggaaaaagagttggtagctcttgatccggcaaacaaaccaccgctggtagcggtggtttttttgtttgcaagcagcagattacgcgcagaaaaaaaggatctcaagaagatcctttgatcttttctacggggtctgacgctcagtggaacgaaaactcacgttaagggattttggtcatgagattatcaaaaaggatcttcacctagatccttttaaattaaaaatgaagttttaaatcaatctaaagtatatatgagtaaacttggtctgacagttaccaatgcttaatcagtgaggcacctatctcagcgatctgtctatttcgttcatccatagttgcctgactccccgtcgtgtagataactacgatacgggagggcttaccatctggccccagtgctgcaatgataccgcgagacccacgctcaccggctccagatttatcagcaataaaccagccagccggaagggccgagcgcagaagtggtcctgcaactttatccgcctccatccagtctattaattgttgccgggaagctagagtaagtagttcgccagttaatagtttgcgcaacgttgttgccattgctacaggcatcgtggtgtcacgctcgtcgtttggtatggcttcattcagctccggttcccaacgatcaaggcgagttacatgatcccccatgttgtgcaaaaaagcggttagctccttcggtcctccgatcgttgtcagaagtaagttggccgcagtgttatcactcatggttatggcagcactgcataattctcttactgtcatgccatccgtaagatgcttttctgtgactggtgagtactcaaccaagtcattctgagaatagtgtatgcggcgaccgagttgctcttgcccggcgtcaatacgggataataccgcgccacatagcagaactttaaaagtgctcatcattggaaaacgttcttcggggcgaaaactctcaaggatcttaccgctgttgagatccagttcgatgtaacccactcgtgcacccaactgatcttcagcatcttttactttcaccagcgtttctgggtgagcaaaaacaggaaggcaaaatgccgcaaaaaagggaataagggcgacacggaaatgttgaatactcatactcttcctttttcaatattattgaagcatttatcagggttattgtctcatgagcggatacatatttgaatgtatttagaaaaataaacaaataggggttccgcgcacatttccccgaaaagtgccacctgacgtctaagaaaccattattatcatgacattaacctataaaaataggcgtatcacgaggcc

SEQ ID NO: 110 - RNA, 41 nt, Artificial Sequence
  Synthetically constructed RNA targeting cTAG M
uaauuucuacucuuguagaugguuaaagaugguuaaaugau

SEQ ID NO: 111 - RNA, 41 nt, Artificial Sequence
  Synthetically constructed RNA targeting cTAG N
uaauuucuacucuuguagauggauguuaagagucccuaucu

SEQ ID NO: 112 - RNA, 41 nt, Artificial Sequence
  Synthetically constructed RNA targeting cTAG O
uaauuucuacucuuguagauaccgccccccccauaccccaa

SEQ ID NO: 113 - RNA, 43 nt, Artificial Sequence
  Synthetically constructed RNA targeting cTAG P
uaauuucuacucuuguagauaggaguguucagucuccgugaac

SEQ ID NO: 114 - protein, 9 aa, Unknown
  P53 TAD1 transcription factor domain
ETFSDLWKL

SEQ ID NO: 115 - protein, 9 aa, Unknown
  P53 TAD2 transcription factor domain
DDIEQWFTE

SEQ ID NO: 116 - protein, 8 aa, Unknown
  MLL transcription factor domain
DIMDFVLK

SEQ ID NO: 117 - protein, 9 aa, Unknown
  EA2 transcription factor domain
DLLDFSMMF

SEQ ID NO: 118 - protein, 9 aa, Unknown
  Rtg3 transcription factor domain
ETLDFSLVT

SEQ ID NO: 119 - protein, 9 aa, Unknown
  CREB transcription factor domain
RKILNDLSS

SEQ ID NO: 120 - protein, 9 aa, Unknown
  CREBaB6 transcription factor domain
EAILAELKK

SEQ ID NO: 121 - protein, 9 aa, Unknown
  Gli3 transcription factor domain
DDVVQYLNS

SEQ ID NO: 122 - protein, 9 aa, Unknown
  Gal4 transcription factor domain
DDVYNYLFD

SEQ ID NO: 123 - protein, 9 aa, Unknown
  Oaf1 transcription factor domain
DLFDYDFLV

SEQ ID NO: 124 - protein, 9 aa, Unknown
  Pip2 transcription factor domain
DFFDYDLLF

SEQ ID NO: 125 - protein, 9 aa, Unknown
  Pdr1 transcription factor domain
EDLYSILWS

SEQ ID NO: 126 - protein, 9 aa, Unknown
  Pdr3 transcription factor domain
TDLYHTLWN

1. A recombinant modular CRISPR DNA construct for modulating the expression of a host cell gene, said construct comprising a CRISPR multi-clonal site, said multi-clonal site comprising:
a) at least two distinct cloning tags (cTAGs), wherein each cTAG comprises:
i) one or more validated CRISPR landing sites, each comprising a protospacer sequence operably linked to a protospacer adjacent motif (PAM); wherein at least one of said validated CRISPR landing sites is unique within the modular CRISPR DNA construct; and
b) one or more DNA insert part(s);
i) wherein each of said distinct cTAGs are distributed in flanking positions around each of the one or more DNA insert part(s);
wherein the construct further comprises:
c) a first nucleic acid encoding a catalytically inactivated CRISPR enzyme;
d) a second nucleic acid encoding a guide RNA capable of recruiting the catalytically inactivated CRISPR enzyme of (c) to a DNA target site.

2. The recombinant modular CRISPR DNA construct of claim 1, wherein the first nucleic acid is comprised within an insert part within the CRISPR multi-clonal site.

3. The recombinant modular CRISPR DNA construct of claim 2, wherein the insert part comprising the first nucleic acid further comprises a selectable marker.

4. The recombinant modular CRISPR DNA construct of claim 1, wherein the second nucleic acid is comprised within an insert part within the CRISPR multi-clonal site.

5. The recombinant modular CRISPR DNA construct of claim 4, wherein the insert part comprising the second nucleic acid further comprises a selectable marker.

6. The recombinant modular CRISPR DNA construct of claim 1, wherein the first nucleic acid and the second nucleic acid are each comprised within their own insert part within the CRISPR multi-clonal site.

7. The recombinant modular CRISPR DNA construct of claim 6, wherein the insert parts comprising the first nucleic acid and the second nucleic acid each comprise a selectable marker.

8. The recombinant modular CRISPR DNA construct of claim 7, wherein the selectable marker comprised in the insert part comprising the first nucleic acid and the selectable marker comprised in the insert part comprising the second nucleic acid are different.

9. The recombinant modular CRISPR DNA construct of claim 1, wherein the construct further comprises (e) a third nucleic acid encoding a transcriptional activation protein that, when expressed, is capable of attaching itself to the catalytically inactivated CRISPR enzyme.

10. The recombinant modular CRISPR DNA construct of claim 1, wherein the construct further comprises (e) a third nucleic acid encoding a transcriptional repressor protein that, when expressed, is capable of attaching itself to the catalytically inactivated CRISPR enzyme.

11. The recombinant modular CRISPR DNA construct of claim 1, wherein the first nucleic acid encodes a catalytically inactivated CRISPR enzyme that is translationally fused to a transcriptional activation protein.

12. The recombinant modular CRISPR DNA construct of claim 1, wherein the first nucleic acid encodes a catalytically inactivated CRISPR enzyme that is translationally fused to a transcriptional repressor.

13. The recombinant modular CRISPR DNA construct of claim 11, wherein the transcriptional activation protein is selected from the group consisting of: VP16, VP64, VP160, and VPR.

14. The recombinant modular CRISPR DNA construct of claim 12, wherein the transcriptional repressor is selected from the group consisting of: Mxi1, Tbx3, KRAB, EnR, and SID.

15. The recombinant modular CRISPR DNA construct of claim 1, wherein at least one of said distinct cTAGs comprises a rare (≥8 bases long) restriction endonuclease site.

16. The modular CRISPR DNA construct of claim 1, wherein the catalytically inactivated CRISPR enzyme is selected from the group consisting of UniProtKB-A0Q7Q2, UniProtKB-A0A182DWE3, and UniProtKB-U2UMQ6.

17. A high throughput method of modulating the expression of one or more host cell genes, said method comprising the step of introducing the recombinant modular CRISPR DNA construct of claim 1 into the host cell; wherein the DNA target site of the guide RNA is located within the host cell genome.

18. The high throughput method of claim 17, wherein at least one insert part of the recombinant modular CRISPR DNA construct is integrated into the genome of the host cell.

19. The high throughput method of claim 17, wherein the recombinant modular CRISPR DNA construct remains in the host cell as extra chromosomal DNA.

20. A recombinant modular CRISPR DNA construct for screening CRISPR enzyme variants, said construct comprising a CRISPR multi-clonal site, said multi-clonal site comprising:
a) at least two distinct cloning tags (cTAGs), wherein each cTAG comprises:
i) one or more validated CRISPR landing sites, each comprising a protospacer sequence operably linked to a protospacer adjacent motif (PAM); wherein at least one of said validated CRISPR landing sites is unique within the modular CRISPR DNA construct; and
b) one or more DNA insert part(s);
i) wherein each of said distinct cTAGs are distributed in flanking positions around each of the one or more DNA insert part(s);
wherein the construct further comprises:
c) a first nucleic acid encoding a CRISPR enzyme, or an enzyme suspected of having CRISPR functionality (“putative CRISPR enzyme”);
d) a second nucleic acid encoding a guide RNA capable of binding to a DNA target site.
